(19) United States
(12) Patent Application Publication
(10) Pub. No.: US 2023/0383321 A1
(43) Pub. Date: Nov. 30, 2023

(54) IMPROVED METHOD FOR THE PRODUCTION OF ISOPRENOIDS

(71) Applicant: BASF SE, Ludwigshafen Am Rhein (DE)

(72) Inventors: Moritz Stefan POTT, Ludwigshafen (DE); Stefan SEEMAYER, Ludwigshafen (DE); Michael BREUER, Ludwigshafen (DE); Christian WILLRODT, Ludwigshafen (DE); Jens Klaus PLASSMEIER, Westford, MA (US); Eva MAHLER, Ludwigshafen (DE); Bogdan TOKOVENKO, Ludwigshafen (DE)

(21) Appl. No.: 17/998,703

(22) PCT Filed: May 17, 2021
(86) PCT No.: PCT/EP2021/063025

§ 371 Date: Nov. 14, 2022

(30) Foreign Application Priority Data
May 15, 2020 (EP) 20175075.9

(51) Int. Cl. C12P 9/00; C12N 9/12; C12N 15/70

(52) U.S. Cl. CPC C12P 9/00; C12N 9/1205; C12N 15/70

(57) ABSTRACT

Disclosed herein is a method for the production of isopentenyl diphosphate, dimethylallyl diphosphate and/or isoprenoids derived therefrom.

### CROSS-REFERENCE TO RELATED APPLICATIONS

[0001] This application is a U.S. National Phase Application of International Patent Application No. PCT/EP2021/063025, filed May 17, 2021, which claims priority to European Patent Application No. 20175075.9, filed May 15, 2020, each of which is hereby incorporated by reference herein.

### REFERENCE TO AN ELECTRONIC SEQUENCE LISTING

[0002] The contents of the electronic sequence listing (278432037SEQ.txt; Size: 711 kb; and Date of Creation: Jul. 28, 2023) is herein incorporated by reference in its entirety.

### DESCRIPTION OF THE INVENTION

[0003] The present invention is in the field of biocatalysis, bio-conversion and fermentation and is directed to a method for the production of isopentenyl diphosphate, dimethylallyl diphosphate and/or isoprenoids derived therefrom.

### INTRODUCTION

[0004] Isoprenoids present an incredibly diverse class of natural products that are vastly applied in flavours and fragrances, cosmetics, agriculture, nutrition, as well as pharmaceutical building blocks (Chandran, S. S., J. T. Kealey, and C. D. Reeves, Microbial production of isoprenoids. Process Biochemistry, 2011. 46(9): p. 1703-1710). The biological synthesis of isoprenoids proceeds via the key intermediates isopentenyl diphosphate (IPP) and its isomer dimethylallyl diphosphate (DMAPP). In nature these intermediates are assembled either via the mevalonate or the 1-deoxy-D-xylulose-5-phosphate pathway which are both branching of the primary metabolism. Both pathways are energy intensive for the production organism and they are both subject to highly complex regulation. Ultimately, this limits the theoretically achievable carbon-yield and hence the minimal production cost of isoprenoids via this route. In that regard, an alternative access to IPP or DMAPP, circumventing the mevalonate and the 1-deoxy-D-xylulose-5-phosphate pathway, offers a huge potential to achieve dramatically reduced cost of isoprenoid production. Recently, the research groups of Stephanopoulos (Chatzivasileiou, A. O., et al., Two-step pathway for isoprenoid synthesis. Proc Natl Acad Sci U S A, 2019. 116(2): p. 506-511; Ward, V. C. A., A. O. Chatzivasileiou, and G. Stephanopoulos, Cell free biosynthesis of isoprenoids from isopentenol. Biotechnol Bioeng, 2019. 116(12): p. 3269-3281), Gonzalez (Clomburg, J. M., et al., The isoprenoid alcohol pathway, a synthetic route for isoprenoid biosynthesis. Proc Natl Acad Sci U S A, 2019. 116(26): p. 12810-12815), and Williams (Lund, S., R. Hall, and G. J. Williams, An Artificial Pathway for Isoprenoid Biosynthesis Decoupled from Native Hemiterpene Metabolism. ACS Synth Biol, 2019. 8(2): p. 232-238) have put forward such an alternative route. They conceived an artificial pathway that starts from readily available, chemically synthesized, isoprenol or prenol and builds up IPP and DMAPP via two subsequent phosphorylation reactions. In the first step an enzyme, kinase 1, is synthesizing isopentenyl phosphate (IP) from isoprenol or dimethylallyl diphosphate (DMAP) from prenol. The two products are than the substrate of a kinase 2 which transfers the second phosphate moiety to yield IPP or DMAPP. Within the artificial pathway the identification of an efficient kinase 1 as well as an efficient kinase 2 constitutes a considerable challenge, as a kinase 1 reactivity in nature is not described and kinase 2 often has a low efficiency. We identified enzymes that are efficient kinase 1 catalysts enabling high yielding production of IP/DMAP from isoprenol/prenol, as well as efficient kinase 2 catalysts that produce high yielding IPP/DMAPP from IP/DMAP. Further we could establish highly efficient production of isoprenoids starting from these intermediates.

### DETAILED DESCRIPTION OF THE INVENTION

[0005] A first embodiment of the invention comprises an isolated kinase 1 capable of catalysing the reaction from isoprenol (3-methyl-3-buten-1-ol) and/or prenol (3,3-dimethylallyl alcohol, 3-methyl-2-buten-1-ol) to isopentenylphosphate (isopentenyl monophosphate, 3-methylbut-3-enyl dihydrogen phosphate) or a salt thereof and/or dimethylallyl phosphate (3-methylbut-2-enyl dihydrogen phosphate) or a salt thereof in an aqueous medium comprising water, kinase 1 and isoprenol and/or prenol, and optionally a nucleotide triphosphate, preferably ATP and a divalent cation, preferably Mg2+, wherein after incubation at least 10%, preferably at least 15%, more preferably at least 20%, even more preferably at least 25%, even more preferably at least 30%, even more preferably at least 35%, even more preferably at least 40%, even more preferably at least 45%, even more preferably at least 50%, even more preferably at least 50%, even more preferably at least 55%, even more preferably at least 60%, even more preferably at least 65%, even more preferably at least 70%, even more preferably at least 75%, even more preferably at least 80%, even more preferably at least 85%, even more preferably at least 90%, even more preferably at least 95%, even more preferably at least 96%, 97%, 98%, 99% or 100% of the isoprenol and/or prenol have been converted to isopentenylphosphate or a salt thereof and/or dimethylallyl phosphate or a salt thereof.

[0006] The incubation time of the aqueous medium may be at least 0.5h, at least 1 h, at least 1.5h, at least 2h, at least 2.5h, at least 5h, at least 10h or at least 12h.

[0007] In one embodiment the incubation is performed at 10° C. to 50° C., preferably at 15° C. to 40° C., more preferably at 20° C. to 40° C., even more preferably at 24° C. to 37° C., most preferably at 36° C. to 38° C.

[0008] In a preferred embodiment after incubation for 10 hours at 37° C. at least 20% of the isoprenol and/or prenol have been converted to isopentenylphosphate or a salt thereof and/or dimethylallyl phosphate or a salt thereof. In a more preferred embodiment after incubation for 7 hours at 37° C. at least 20% of the isoprenol and/or prenol have been converted to isopentenylphosphate or a salt thereof and/or dimethylallyl phosphate or a salt thereof. In an even more preferred embodiment after incubation for 7 hours at 37° C. at least 25% of the isoprenol and/or prenol have been converted to isopentenylphosphate or a salt thereof and/or dimethylallyl phosphate or a salt thereof. In an even more preferred embodiment after incubation for 18 h at 37° C. at least 40% of the isoprenol and/or prenol have been converted to isopentenylphosphate or a salt thereof and/or dimethylallyl phosphate or a salt thereof. In a most preferred embodiment after incubation for 5 hours at 37° C. at least 25% of the isoprenol and/or prenol have been converted to isopentenylphosphate or a salt thereof and/or dimethylallyl phosphate or a salt thereof.

[0009] In one embodiment of the invention, the isolated kinase 1 comprises at a position corresponding to the respective position in SEQ ID NO: 37 no 14A, no 122A, no 174M and/or no 217T. Preferably the kinase 1 of the invention comprises at a position corresponding to the respective position in SEQ ID NO: 37 at least 3, preferably at least 4 of 14Y, K or T, 122S or T, 174K or V and/or 217E or M.

[0010] In a further embodiment of the invention, the isolated kinase 1 comprises at a position corresponding to the respective position in SEQ ID NO: 37 no 30D, E, S or Y, no 33G or S, no 125S or T and/or no 201A, I or S. Preferably the kinase 1 of the invention comprises at a position corresponding to the respective position in SEQ ID NO: 37 at least 2, preferably at least 3, preferably at least 4 of 30N, 33T, 125 K, and/or 201 C or D.

[0011] In one embodiment, the isolated kinase 1 is comprising a sequence selected from the group consisting of
[0012] a. The amino acid molecule of SEQ ID NO: 43, 46, 49, 52, 123, 126, 135, 138, 144, 150, 153, 324, 351, 357, 375, 378, 390, or 393 and
[0013] b. An amino acid molecule having at least 50% identity to the amino acid molecule of SEQ ID NO: 43, 46, 49 52, 123, 126, 135, 138, 144, 150, 153, 324, 351, 357, 375, 378, 390, or 393 or a functional fragment thereof, and
[0014] c. An amino acid molecule encoded by a nucleic acid molecule of SEQ ID NO: 44, 45, 47, 48, 50, 51, 53 54, 124, 127, 136, 139, 145, 151, 154, 325, 358, 379, 394, 125, 128, 137, 140, 146, 152, 155, 326, 353, 359, 377, 380, 392, or 395, or a functional fragment thereof, and
[0015] d. An amino acid molecule encoded by a nucleic acid molecule having at least 50% identity to SEQ ID NO: 44, 45, 47, 48, 50, 51, 53 54, 124, 127, 136, 139, 145, 151, 154, 325, 358, 379, 394, 125, 128, 137, 140, 146, 152, 155, 326, 353, 359, 377, 380, 392, or 395, or a functional fragment thereof, and
[0016] e. An amino acid molecule encoded by a nucleic acid molecule hybridizing under stringent conditions to a fragment of at least 250 bases complementary to SEQ ID NO: 44, 45, 47, 48, 50, 51, 53 54, 124, 127, 136, 139, 145, 151, 154, 325, 358, 379, 394, 125, 128, 137, 140, 146, 152, 155, 326, 353, 359, 377, 380, 392, or 395, or a functional fragment thereof,
   wherein the amino acid molecule as defined in b., c., d. and e. is catalysing the reaction from isoprenol and/or prenol to isopentenylphosphate and/or dimethylallyl phosphate in an aqueous medium, and,
   wherein after incubation at least 10%, preferably at least 15%, more preferably at least 20%, even more preferably at least 25%, even more preferably at least 30%, even more preferably at least 35%, even more preferably at least 40%, even more preferably at least 45%, even more preferably at least 50%, even more preferably at least 55%, even more preferably at least 60%, even more preferably at least 65%, even more preferably at least 70%, even more preferably at least 75%, even more preferably at least 80%, even more preferably at least 85%, even more preferably at least 90%, even more preferably at least 95%, even more preferably at least 96%, 97%, 98%, 99% or 100% of the isoprenol and/or prenol have been converted to isopentenylphosphate or a salt thereof and/or dimethylallyl phosphate or a salt thereof.

[0017] The incubation time of the aqueous medium may be at least 0.5 h, at least 1 h, at least 1.5 h, at least 2 h, at least 2.5 h, at least 5 h, at least 10 h or at least 12 h.

[0018] In one embodiment the incubation is performed at 10° C. to 50° C., preferably at 15° C. to 40° C., more preferably at 20° C. to 40° C., even more preferably at 24° C. to 37° C., most preferably at 36° C. to 38° C.

[0019] In a preferred embodiment after incubation for 10 hours at 37° C. at least 20% of the isoprenol and/or prenol have been converted to isopentenylphosphate or a salt thereof and/or dimethylallyl phosphate or a salt thereof. In a more preferred embodiment after incubation for 7 hours at 37° C. at least 20% of the isoprenol and/or prenol have been converted to isopentenylphosphate or a salt thereof and/or dimethylallyl phosphate or a salt thereof. In an even more preferred embodiment after incubation for 7 hours at 37° C. at least 25% of the isoprenol and/or prenol have been converted to isopentenylphosphate or a salt thereof and/or dimethylallyl phosphate or a salt thereof. In an even more preferred embodiment after incubation for 18 h at 37° C. at least 40% of the isoprenol and/or prenol have been converted to isopentenylphosphate or a salt thereof and/or dimethylallyl phosphate or a salt thereof. In a most preferred embodiment after incubation for 5 hours at 37° C. at least 25% of the isoprenol and/or prenol have been converted to isopentenylphosphate or a salt thereof and/or dimethylallyl phosphate or a salt thereof.

[0020] In one embodiment of the invention, the amino acid molecule as defined in b., c., d. and e comprises at a position corresponding to the respective position in SEQ ID NO: 37 no 14A, no 122A, no 174M and/or no 217T. Preferably the kinase 1 of the invention comprises at a position corresponding to the respective position in SEQ ID NO: 37 at least 3, preferably at least 4 of 14Y, K or T, 122S or T, 174K or V and/or 217E or M.

[0021] In a further embodiment of the invention, the amino acid molecule as defined in b., c., d. and e comprises at a position corresponding to the respective position in SEQ ID NO: 37 no 30D, E, S or Y, no 33G or S, no 125S or T and/or no 201A, I or S. Preferably the kinase 1 of the invention comprises at a position corresponding to the respective position in SEQ ID NO: 37 at least 2, preferably at least 3, preferably at least 4 of 30N, 33T, 125 K, and/or 201 C or D.

[0022] A further embodiment of the invention is an isolated kinase 1 comprising a sequence selected from the group consisting of
[0023] a. The amino acid molecule of SEQ ID NO: 43, 46, 49, 52, 123, 126, 135, 138, 144, 150, 153, 324, 351, 357, 375, 378, 390, or 393 and
[0024] b. An amino acid molecule having at least 50% identity to the amino acid molecule of SEQ ID NO: 43, 46, 49, 52, 123, 126, 135, 138, 144, 150, 153, 324, 351, 357, 375, 378, 390, or 393, or a functional fragment thereof, and
[0025] c. An amino acid molecule encoded by a nucleic acid molecule of SEQ ID NO: 44, 45, 47, 48, 50, 51, 53, 54, 124, 127, 136, 139, 145, 151, 154, 325, 358, 379, 394, 125, 128, 137, 140, 146, 152, 155, 326, 353, 359, 377, 380, 392, or 395 or a functional fragment thereof, and
[0026] d. An amino acid molecule encoded by a nucleic acid molecule having at least 50% identity to SEQ ID NO: 44, 45, 47, 48, 50, 51, 53, 54, 124, 127, 136, 139, 145, 151, 154, 325, 358, 379, 394, 125, 128, 137, 140, 146, 152, 155, 326, 353, 359, 377, 380, 392, or 395 or a functional fragment thereof, and
[0027] e. An amino acid molecule encoded by a nucleic acid molecule hybridizing under stringent conditions to a fragment of at least 250 bases complementary to SEQ ID NO: 44, 45, 47, 48, 50, 51, 53, 54, 124, 127, 136, 139, 145, 151, 154, 325, 358, 379, 394, 125, 128, 137, 140, 146, 152, 155, 326, 353, 359, 377, 380, 392, or 395 or a functional fragment thereof,
   wherein the amino acid molecule as defined in b., c., d. and e. is catalysing the reaction from isoprenol and/or prenol to isopentenylphosphate and/or dimethylallyl phosphate in an aqueous medium.

[0028] A further embodiment of the invention is a process for producing isopentenylphosphate and/or dimethylallyl phosphate or salt thereof comprising the steps of
[0029] i. Providing an aqueous medium comprising water, one or more kinase 1 and prenol and/or isoprenol and optionally a nucleotide triphosphate, preferably ATP and a divalent cation, preferably Mg²⁺ and
[0030] ii. Incubating the aqueous medium and
[0031] iii. Optionally isolating the isopentenylphosphate and/or dimethylallyl phosphate or salt thereof from the reaction mixture,
   wherein the one or more kinase 1 is capable of catalysing the reaction from prenol and/or isoprenol to isopentenylphosphate and/or dimethylallyl phosphate in an aqueous medium comprising water, kinase 1 and prenol and/or isoprenol and optionally a nucleotide triphosphate, preferably ATP and a divalent cation, preferably Mg²⁺, wherein after incubation at least 10%, preferably at least 15%, more preferably at least 20%, even more preferably at least 25%, even more preferably at least 30%, even more preferably at least 35%, even more preferably at least 40%, even more preferably at least 45%, even more preferably at least 50%, even more preferably at least 55%, even more preferably at least 60%, even more preferably at least 65%, even more preferably at least 70%, even more preferably at least 75%, even more preferably at least 80%, even more preferably at least 85%, even more preferably at least 90%, even more preferably at least 95%, even more preferably at least 96%, 97%, 98%, 99% or 100% of the isoprenol and/or prenol have been converted to isopentenylphosphate or a salt thereof and/or dimethylallyl phosphate or a salt thereof.

[0032] The incubation time of the aqueous medium may be at least 0.5 h, at least 1 h, at least 1.5 h, at least 2 h, at least 2.5 h, at least 5 h, at least 10 h or at least 12 h.

[0033] In one embodiment the incubation is performed at 10° C. to 50° C., preferably at 15° C. to 40° C., more preferably at 20° C. to 40° C., even more preferably at 24° C. to 37° C., most preferably at 36° C. to 38° C.

[0034] In a preferred embodiment after incubation for 10 hours at 37° C. at least 20% of the isoprenol and/or prenol have been converted to isopentenylphosphate or a salt thereof and/or dimethylallyl phosphate or a salt thereof. In a more preferred embodiment after incubation for 7 hours at 37° C. at least 20% of the isoprenol and/or prenol have been converted to isopentenylphosphate or a salt thereof and/or dimethylallyl phosphate or a salt thereof. In an even more preferred embodiment after incubation for 7 hours at 37° C. at least 25% of the isoprenol and/or prenol have been converted to isopentenylphosphate or a salt thereof and/or dimethylallyl phosphate or a salt thereof. In an even more preferred embodiment after incubation for 18 h at 37° C. at least 40% of the isoprenol and/or prenol have been converted to isopentenylphosphate or a salt thereof and/or dimethylallyl phosphate or a salt thereof. In a most preferred embodiment after incubation for 5 hours at 37° C. at least 25% of the isoprenol and/or prenol have been converted to isopentenylphosphate or a salt thereof and/or dimethylallyl phosphate or a salt thereof.

[0035] The aqueous medium may be a solution or a suspension or a solution and a suspension, wherein any of the substances comprised in said aqueous medium may be fully or partially dissolved and/or partially or fully suspended.

[0036] In one embodiment of the process of the invention the kinase 1 is comprising a sequence selected from the group consisting of
[0037] a. The amino acid molecule of SEQ ID NO: 43, 46, 49, 52, 123, 126, 135, 138, 144, 150, 153, 324, 351, 357, 375, 378, 390, or 393 and
[0038] b. An amino acid molecule having at least 50% identity to the amino acid molecule of SEQ ID NO: 43, 46, 49,52, 123, 126, 135, 138, 144, 150, 153, 324, 351, 357, 375, 378, 390, or 393, or a functional fragment thereof, and
[0039] c. An amino acid molecule encoded by a nucleic acid molecule of SEQ ID NO: 44, 45, 47, 48, 50, 51, 53, 54, 124, 127, 136, 139, 145, 151, 154, 325, 358, 379, 394, 125, 128, 137, 10 140, 146, 152, 155, 326, 353, 359, 377, 380, 392, or 395 or a functional fragment thereof, and
[0040] d. An amino acid molecule encoded by a nucleic acid molecule having at least 50% identity to SEQ ID NO: 44, 45, 47, 48, 50, 51, 53, 54, 124, 127, 136, 139, 145, 151, 154, 325, 358, 379, 394, 125, 128, 137, 140, 146, 152, 155, 326, 353, 359, 377, 380, 392, or 395 or a functional fragment thereof, and
[0041] e. An amino acid molecule encoded by a nucleic acid molecule hybridizing under stringent conditions to a fragment of at least 250 bases complementary to SEQ ID NO: 44, 45, 47, 48, 50, 51, 53, 54, 124, 127, 136, 139, 145, 151, 154, 325, 358, 379, 394, 125, 128, 137, 140, 146, 152, 155, 326, 353, 359, 377, 380, 392, or 395 or a functional fragment thereof,
   wherein the amino acid molecule as defined in b., c., d. and e. is catalysing the reaction from isoprenol and/or prenol to isopentenylphosphate and/or dimethylallyl phosphate in an aqueous medium and wherein after incubation at least 10%, preferably at least 15%, more preferably at least 20%, even more preferably at least 25%, even more preferably at least 30%, even more preferably at least 35%, even more preferably at least 40%, even more preferably at least 45%, even more preferably at least 50%, even more preferably at least 55%, even more preferably at least 60%, even more preferably at least 65%, even more preferably at least 70%, even more preferably at least 75%, even more preferably at least 80%, even more preferably at least 85%, even more preferably at least 90%, even more preferably at least 95%, even more preferably at least 96%, 97%, 98%, 99% or 100% of the isoprenol and/or prenol have been converted to isopentenylphosphate or a salt thereof and/or dimethylallyl phosphate or a salt thereof.

[0042] The incubation time of the aqueous medium may be at least 0.5 h, at least 1 h, at least 1.5 h, at least 2 h, at least 2.5 h, at least 5 h, at least 10 h or at least 12 h.

[0043] In one embodiment the incubation is performed at 10° C. to 50° C., preferably at 15° C. to 40° C., more preferably at 20° C. to 40° C., even more preferably at 24° C. to 37° C., most preferably at 36° C. to 38° C.

[0044] In a preferred embodiment after incubation for 10 hours at 37° C. at least 20% of the isoprenol and/or prenol have been converted to isopentenylphosphate or a salt thereof and/or dimethylallyl phosphate or a salt thereof. In a more preferred embodiment after incubation for 7 hours at 37° C. at least 20% of the isoprenol and/or prenol have been converted to isopentenylphosphate or a salt thereof and/or dimethylallyl phosphate or a salt thereof. In an even more preferred embodiment after incubation for 7 hours at 37° C. at least 25% of the isoprenol and/or prenol have been converted to isopentenylphosphate or a salt thereof and/or dimethylallyl phosphate or a salt thereof. In an even more preferred embodiment after incubation for 18 h at 37° C. at least 40% of the isoprenol and/or prenol have been converted to isopentenylphosphate or a salt thereof and/or dimethylallyl phosphate or a salt thereof. In a most preferred embodiment after incubation for 5 hours at 37° C. at least 25% of the isoprenol and/or prenol have been converted to isopentenylphosphate or a salt thereof and/or dimethylallyl phosphate or a salt thereof.

[0045] In one embodiment of the invention, the amino acid molecule as defined in b., c., d. and e comprises at a position corresponding to the respective position in SEQ ID NO: 37 no 14A, no 122A, no 174M and/or no 217T. Preferably the kinase 1 of the invention comprises at a position corresponding to the respective position in SEQ ID NO: 37 at least 3, preferably at least 4 of 14Y, K or T, 122S or T, 174K or V and/or 217E or M.

[0046] In a further embodiment of the invention, the amino acid molecule as defined in b., c., d. and e comprises at a position corresponding to the respective position in SEQ ID NO: 37 no 30D, E, S or Y, no 33G or S, no 125S or T and/or no 201A, I or S. Preferably the kinase 1 of the invention comprises at a position corresponding to the respective position in SEQ ID NO: 37 at least 2, preferably at least 3, preferably at least 4 of 30N, 33T, 125 K, and/or 201 C or D.

[0047] A further embodiment of the invention is a process for producing isopentenylphosphate and/or dimethylallyl phosphate or salt thereof comprising the steps of
[0048] i. Providing an aqueous medium comprising water, one or more kinase 1 and isoprenol and/or prenol and optionally a nucleotide triphosphate, preferably ATP and a divalent cation, preferably Mg²⁺ and,
[0049] ii. Incubating the aqueous medium and
[0050] iii. Optionally isolating the isopentenylphosphate and/or dimethylallyl phosphate or salt thereof from the reaction mixture,
   wherein the one or more kinase 1 is comprising a sequence selected from the group consisting of
[0051] a. The amino acid molecule of SEQ ID NO: 43, 46, 49, 52, 123, 126, 135, 138, 144, 150, 153, 324, 351, 357, 375, 378, 390, or 393 and
[0052] b. An amino acid molecule having at least 50% identity to the amino acid molecule of SEQ ID NO: 43, 46, 49, 52, 123, 126, 135, 138, 144, 150, 153, 324, 351, 357, 375, 378, 390, or 393 or a functional fragment thereof, and
[0053] c. An amino acid molecule encoded by a nucleic acid molecule of SEQ ID NO: 44, 45, 47, 48, 50, 51, 53, 54, 124, 127, 136, 139, 145, 151, 154, 325, 358, 379, 394, 125, 128, 137, 140, 146, 152, 155, 326, 353, 359, 377, 380, 392, or 395 or a functional fragment thereof, and
[0054] d. An amino acid molecule encoded by a nucleic acid molecule having at least 50% identity to SEQ ID NO: 44, 45, 47, 48, 50, 51, 53, 54, 124, 127, 136, 139, 145, 151, 154, 325, 358, 379, 394, 125, 128, 137, 140, 146, 152, 155, 326, 353, 359, 377, 380, 392, or 395 or a functional fragment thereof, and
[0055] e. An amino acid molecule encoded by a nucleic acid molecule hybridizing under stringent conditions to a fragment of at least 250 bases complementary to SEQ ID NO: 44, 45, 47, 48, 50, 51, 53, 54, 124, 127, 136, 139, 145, 151, 154, 325, 358, 379, 394, 125, 128, 137, 140, 146, 152, 155, 326, 353, 359, 377, 380, 392, or 395 or a functional fragment thereof,
   wherein the amino acid molecule as defined in b., c., d. and e. is catalysing the reaction from isoprenol and/or prenol to isopentenylphosphate and/or dimethylallyl phosphate in an aqueous medium.

[0056] In one embodiment of the invention, the amino acid molecule as defined in b., c., d. and e comprises at a position corresponding to the respective position in SEQ ID NO: 37 no 14A, no 122A, no 174M and/or no 217T. Preferably the kinase 1 of the invention comprises at a position corresponding to the respective position in SEQ ID NO: 37 at least 3, preferably at least 4 of 14Y, K or T, 122S or T, 174K or V and/or 217E or M.

[0057] In a further embodiment of the invention, the amino acid molecule as defined in b., c., d. and e comprises at a position corresponding to the respective position in SEQ ID NO: 37 no 30D, E, S or Y, no 33G or S, no 125S or T and/or no 201A, I or S. Preferably the kinase 1 of the invention comprises at a position corresponding to the respective position in SEQ ID NO: 37 at least 2, preferably at least 3, preferably at least 4 of 30N, 33T, 125 K, and/or 201 C or D.

[0058] The aqueous medium may be a solution or a suspension or a solution and a suspension, wherein any of the substances comprised in said aqueous medium may be fully or partially dissolved and/or partially or fully suspended.

[0059] A further embodiment of the invention is a recombinant construct comprising a kinase 1 wherein the kinase 1 is comprising a sequence encoding an amino acid molecule selected from the group consisting of
[0060] a. The amino acid molecule of SEQ ID NO: 43, 46, 49, 52, 123, 126, 135, 138, 144, 150, 153, 324, 351, 357, 375, 378, 390, or 393 and
[0061] b. An amino acid molecule having at least 50% identity to the amino acid molecule of SEQ ID NO: 43, 46, 49, 52, 123, 126, 135, 138, 144, 150, 153, 324, 351, 357, 375, 378, 390, or 393, or a functional fragment thereof, and
[0062] c. An amino acid molecule encoded by a nucleic acid molecule of SEQ ID NO: 44, 45, 47, 48, 50, 51, 53, 54, 124, 127, 136, 139, 145, 151, 154, 325, 358, 379, 394, 125, 128, 137, 140, 146, 152, 155, 326, 353, 359, 377, 380, 392, or 395 or a functional fragment thereof, and
[0063] d. An amino acid molecule encoded by a nucleic acid molecule having at least 50% identity to SEQ ID NO: 44, 45, 47, 48, 50, 51, 53, 54, 124, 127, 136, 139, 145, 151, 154, 325, 358, 379, 394, 125, 128, 137, 140, 146, 152, 155, 326, 353, 359, 377, 380, 392, or 395 or a functional fragment thereof, and
[0064] e. An amino acid molecule encoded by a nucleic acid molecule hybridizing under stringent conditions to a fragment of at least 250 bases complementary to SEQ ID NO: 44, 45, 47, 48, 50, 51, 53, 54, 124, 127, 136, 139, 145, 151, 154, 325, 358, 379, 394, 125, 128, 137, 140, 146, 152, 155, 326, 353, 359, 377, 380, 392, or 395 or a functional fragment thereof,
   wherein the amino acid molecule as defined in b., c., d. and e. is catalysing the reaction from isoprenol and/or prenol to isopentenylphosphate and/or dimethylallyl phosphate in an aqueous medium.

[0065] In one embodiment of the invention, the amino acid molecule as defined in b., c., d. and e comprises at a position corresponding to the respective position in SEQ ID NO: 37 no 14A, no 122A, no 174M and/or no 217T. Preferably the kinase 1 of the invention comprises at a position corresponding to the respective position in SEQ ID NO: 37 at least 3, preferably at least 4 of 14Y, K or T, 122S or T, 174K or V and/or 217E or M.

[0066] In a further embodiment of the invention, the amino acid molecule as defined in b., c., d. and e comprises at a position corresponding to the respective position in SEQ ID NO: 37 no 30D, E, S or Y, no 33G or S, no 125S or T and/or no 201A, I or S. Preferably the kinase 1 of the invention comprises at a position corresponding to the respective position in SEQ ID NO: 37 at least 2, preferably at least 3, preferably at least 4 of 30N, 33T, 125 K, and/or 201 C or D.

[0067] Said recombinant construct for expressing the kinase 1 may be integrated into the genome of an organism or the recombinant construct for expressing the kinase 1 may be comprised on a vector such as a plasmid or viral vector that is introduced into an organism.

[0068] The kinase 1 in the recombinant construct may be functionally linked to a heterologous promoter, a heterologous terminator and/or any other heterologous genetic element.

[0069] A further embodiment of the invention is a recombinant vector, such a s an expression vector or a viral vector comprising said recombinant construct.

[0070] In a particularly preferred embodiment, said vector comprises the sequence of SEQ ID NO: 109, 110, or 491.

[0071] A further embodiment of the invention is a recombinant microorganism comprising said recombinant construct or said recombinant vector.

[0072] In some embodiments, the recombinant microorganism is a prokaryotic cell. Suitable prokaryotic cells include Gram-positive, Gram negative and Gram-variable bacterial cells, preferably Gram-negative.

[0073] Thus, prokaryotic microorganisms that can be used in the present invention include, but are not limited to, Gluconobacter oxydans, Gluconobacter asaii, Achromobacter delmarvae, Achromobacter viscosus, Achromobacter lacticum, Agrobacterium tumefaciens, Agrobacterium radiobacter, Alcaligenes faecalis, Arthrobacter citreus, Arthrobacter tumescens, Arthrobacter paraffineus, Arthrobacter hydrocarboglutamicus, Arthrobacter oxydans, Aureobacterium saperdae, Azotobacter indicus, Brevibacterium ammoniagenes, Brevibacterium divaricatum, Brevibacterium lactofermentum, Brevibacterium flavum, Brevibacterium globosum, Brevibacterium fuscum, Brevibacterium ketoglutamicum, Brevibacterium helcolum, Brevibacterium pusillum, Brevibacterium testaceum, Brevibacterium roseum, Brevibacterium immariophilium, Brevibacterium linens, Brevibacterium protopharmiae, Corynebacterium acetophilum, Corynebacterium glutamicum, Corynebacterium callunae, Corynebacterium acetoacidophilum, Corynebacterium acetoglutamicum, Enterobacter aerogenes, Erwinia amylovora, Erwinia carotovora, Erwinia herbicola, Erwinia chrysanthemi, Flavobacterium peregrinum, Flavobacterium fucatum, Flavobacterium aurantinum, Flavobacterium rhenanum, Flavobacterium sewanense, Flavobacterium breve, Flavobacterium meningosepticum, Micrococcus sp. CCM825, Morganella morganii, Nocardia opaca, Nocardia rugosa, Planococcus eucinatus, Proteus rettgeri, Propionibacterium shermanii, Pseudomonas synxantha, Pseudomonas azotoformans, Pseudomonas jluorescens, Pseudomonas ovalis, Pseudomonas stutzeri, Pseudomonas acidovolans, Pseudomonas mucidolens, Pseudomonas testosteroni, Pseudomonas aeruginosa, Rhodococcus erythropolis, Rhodococcus rhodorhrous, Rhodococcus sp. ATCC 15592, Rhodococcus sp. ATCC 19070, Sporosarcina ureae, Staphylococcus aureus, Vibrio metschnikovii, Vibrio tyrogenes, Actinomadura madurae, Actinomyces violaceochromogenes, Kitasatosporia parulosa, Streptomyces avermitilis, Streptomyces coelicolor, Streptomyces flavelus, Streptomyces griseolus, Streptomyces lividans, Streptomyces olivaceus, Streptomyces tanashiensis, Streptomyces virginiae, Streptomyces antibioticus, Streptomyces cacaoi, Streptomyces lavendulae, Streptomyces viridochromogenes, Aeromonas salmonicida, Bacillus pumilus, Bacillus circulans, Bacillus thiaminolyticus, Escherichia freundii, Microbacterium ammoniaphilum, Serratia marcescens, Salmonella typhimurium, Salmonella schottmulleri, Xanthomonas citri, Synechocystis sp., Synechococcus elongatus, Thermosynechococcus elongatus, Microcystis aeruginosa, Nostoc sp., N. commune, N.sphaericum, Nostoc punctiforme , Spirulina platensis, Lyngbya majuscula, L. lagerheimii, Phormidium tenue, Anabaena sp., Leptolyngbya sp.

[0074] Eukaryotic microorganisms that can be used in the present invention include, but are not limited to Saccharomyces spec, such as Saccharomyces cerevisiae, Hansenula spec, such as Hansenula polymorpha, Schizosaccharomyces spec, such as Schizosaccharomyces pombe, Kluyveromyces spec, such as Kluyveromyces lactis and Kluyveromyces marxianus, Yarrowia spec, such as Yarrowia lipolytica, Pichia spec, such as Pichia methanolica, Pichia stipites and Pichia pastoris, Zygosaccharomyces spec, such as Zygosaccharomyces rouxii and Zygosaccharomyces bailii, Candida spec, such as Candida boidinii, Candida utilis, Candida freyschussii, Candida glabrata and Candida sonorensis, Schwanniomyces spec, such as Schwanniomyces occidentalis, Arxula spec, such as Arxula adeninivorans, Ogataea spec such as Ogataea minuta, Klebsiella spec, such as Klebsiella pneumonia, Aspergillus spec. such as Aspergillus niger or Myceliophthora thermophila.

[0075] Preferred microorganisms of the invention comprise Rhodococcus rhodochrous, Aerococcus sp., Aspergillus sp., Bacillus pumilus, Bacillus subtilis, Bacteroides thetaiotaomicron, Clostridium algidicarnis, Corynebacterium efficiens, Corynebacterium glutamicum, Escherichia coli, Haloferax volcanii, Lactobacillus casei, Methanocaldococcus jannaschii, Methanothermobacter thermautotrophicus, Myceliophthora thermophila, Pichia pastoris, Pseudomonas synxantha, Pseudomonas azotoformans, Pseudomonas jluorescens, Pseudomonas ovalis, Pseudomonas stutzeri, Pseudomonas acidovolans, Pseudomonas mucidolens, Pseudomonas testosteroni, Pseudomonas aeruginosa, Pseudozyma tsukubaensis, Ralstonia eutropha, Rhodobacter sphaeroides, Rhodococcus opacus, Saccharomyces cerevisiae, Shigella boydii, Sinorhizobium meliloti, Streptomyces antibioticus, Streptomyces avermitilis, Streptomyces cacaoi, Streptomyces coelicolor, Streptomyces flavelus, Streptomyces griseolus, Streptomyces lavendulae, Streptomyces lividans, Streptomyces olivaceus, Streptomyces tanashiensis, Streptomyces virginiae, Streptomyces viridochromogenes, Thermoplasma acidophilum, Vibrio natrigens or Yarrowia lipolytica. Especially preferred microorganisms are Bacillus subtilis, Corynebacterium glutamicum, Escherichia coli, Pseudomonas aeruginosa, Pseudomonas putida, Rhodobacter sphaeroides, Rhodococcus opacus, Saccharomyces cerevisiae and Yarrowia lipolytica.

[0076] A further embodiment of the invention is a composition comprising water, a kinase 1, isopentenylphosphate and/or dimethylallyl phosphate and optionally a nucleotide triphosphate, preferably ATP and a divalent cation, preferably Mg² wherein the kinase 1 is comprising a sequence selected from the group consisting of
[0077] a. The amino acid molecule of SEQ ID NO: 43, 46, 49, 52, 123, 126, 135, 138, 144, 150, 153, 324, 351, 357, 375, 378, 390, or 393 and
[0078] b. An amino acid molecule having at least 50% identity to the amino acid molecule of SEQ ID NO: 43, 46, 49, 52, 123, 126, 135, 138, 144, 150, 153, 324, 351, 357, 375, 378, 390, or 393, or a functional fragment thereof, and
[0079] c. An amino acid molecule encoded by a nucleic acid molecule of SEQ ID NO: 44, 45, 47, 48, 50, 51, 53, 54, 124, 127, 136, 139, 145, 151, 154, 325, 358, 379, 394, 125, 128, 137, 140, 146, 152, 155, 326, 353, 359, 377, 380, 392, or 395 or a functional fragment thereof, and
[0080] d. An amino acid molecule encoded by a nucleic acid molecule having at least 50% identity to SEQ ID NO: 44, 45, 47, 48, 50, 51, 53, 54, 124, 127, 136, 139, 145, 151, 154, 325, 358, 379, 394, 125, 128, 137, 140, 146, 152, 155, 326, 353, 359, 377, 380, 392, or 395 or a functional fragment thereof, and
[0081] e. An amino acid molecule encoded by a nucleic acid molecule hybridizing under stringent conditions to a fragment of at least 250 bases complementary to SEQ ID NO: 44, 45, 47, 48, 50, 51, 53, 54, 124, 127, 136, 139, 145, 151, 154, 325, 358, 379, 394, 125, 128, 137, 140, 146, 152, 155, 326, 353, 359, 377, 380, 392, or 395 or a functional fragment thereof,
   wherein the amino acid molecule as defined in b., c., d. and e. is catalysing the reaction from isoprenol and/or prenol to isopentenylphosphate and/or dimethylallyl phosphate in an aqueous medium.

[0082] In one embodiment of the invention, the amino acid molecule as defined in b., c., d. and e comprises at a position corresponding to the respective position in SEQ ID NO: 37 no 14A, no 122A, no 174M and/or no 217T. Preferably the kinase 1 of the invention comprises at a position corresponding to the respective position in SEQ ID NO: 37 at least 3, preferably at least 4 of 14Y, K or T, 122S or T, 174K or V and/or 217E or M.

[0083] In a further embodiment of the invention, the amino acid molecule as defined in b., c., d. and e comprises at a position corresponding to the respective position in SEQ ID NO: 37 no 30D, E, S or Y, no 33G or S, no 125S or T and/or no 201A, I or S. Preferably the kinase 1 of the invention comprises at a position corresponding to the respective position in SEQ ID NO: 37 at least 2, preferably at least 3, preferably at least 4 of 30N, 33T, 125 K, and/or 201 C or D.

[0084] A further embodiment of the invention is a process for producing isopentenyl pyrophosphate and/or dimethylallyl pyrophosphate or salt thereof comprising the steps of
[0085] i. Providing an aqueous medium comprising water, one or more kinase 1, one or more kinase 2 and prenol and/or isoprenol and optionally a nucleotide triphosphate, preferably ATP and a divalent cation, preferably Mg² and,
[0086] ii. Incubating the aqueous medium and
[0087] iii. Optionally isolating the isopentenyl pyrophosphate and/or dimethylallyl pyrophosphate or salt thereof from the reaction mixture,
   [0088] wherein the one or more kinase 1 is capable of catalysing the reaction from prenol and/or isoprenol to isopentenylphosphate and/or dimethylallyl phosphate in an aqueous medium comprising water, kinase 1 and prenol and/or isoprenol, and
      wherein the one or more kinase 2 is capable of catalysing the reaction from isopentenylphosphate and/or dimethylallyl phosphate to isopentenyl pyrophosphate and/or dimethylallyl pyrophosphate in an aqueous medium comprising water, kinase 2 and isopentenylphosphate and/or dimethylallyl phosphate, and optionally a nucleotide triphosphate, preferably ATP and a divalent cation, preferably Mg2+, wherein after incubation at least 10%, preferably at least 15%, more preferably at least 20%, even more preferably at least 25%, even more preferably at least 30%, even more preferably at least 35%, even more preferably at least 40%, even more preferably at least 45%, even more preferably at least 50%, even more preferably at least 55%, even more preferably at least 60%, even more preferably at least 65%, even more preferably at least 70%, even more preferably at least 75%, even more preferably at least 80%, even more preferably at least 85%, even more preferably at least 90%, even more preferably at least 95%, even more preferably at least 96%, 97%, 98%, 99% or 100% of the isoprenol and/or prenol have

[0089] been converted to isopentenyl pyrophosphate and/or dimethylallyl pyrophosphate. The incubation time of the aqueous medium may be at least 0.5 h, at least 1 h, at least 1.5 h, at least 2 h, at least 2.5 h, at least 5 h, at least 10 h or at least 12 h.

[0090] In one embodiment the incubation is performed at 10° C. to 50° C., preferably at 15° C. to 40° C., more preferably at 20° C. to 40° C., even more preferably at 24° C. to 37° C., most preferably at 36° C. to 38° C.

[0091] In a preferred embodiment after incubation for 10 hours at 37° C. at least 20% of the isoprenol and/or prenol have been converted to isopentenyl pyrophosphate and/or dimethylallyl pyrophosphate.

[0092] In a more preferred embodiment after incubation for 7 hours at 37° C. at least 20% of the isoprenol and/or prenol have been converted to isopentenyl pyrophosphate and/or dimethylallyl pyrophosphate. In an even more preferred embodiment after incubation for 7 hours at 37° C. at least 25% of the isoprenol and/or prenol have been converted to isopentenyl pyrophosphate and/or dimethylallyl pyrophosphate. In an even more preferred embodiment after incubation for 18 h at 37° C. at least 40% of the isoprenol and/or prenol have been converted to isopentenyl pyrophosphate and/or dimethylallyl pyrophosphate. In a most preferred embodiment after incubation for 5 hours at 37° C. at least 25% of the isoprenol and/or prenol have been converted to isopentenyl pyrophosphate and/or dimethylallyl pyrophosphate.

[0093] The aqueous medium may be a solution or a suspension or a solution and a suspension, wherein any of the substances comprised in said aqueous medium may be fully or partially dissolved and/or partially or fully suspended.

[0094] In one embodiment of the process of the invention for producing isopentenyl pyrophosphate and/or dimethylallyl pyrophosphate or salt thereof the kinase 1 is comprising a sequence selected from the group consisting of
[0095] a. The amino acid molecule of SEQ ID NO: 43, 46, 49, 52, 123, 126, 135, 138, 144, 150, 153, 324, 351, 357, 375, 378, 390, or 393 and
[0096] b. An amino acid molecule having at least 50% identity to the amino acid molecule of SEQ ID NO: 43, 46, 49 52, 123, 126, 135, 138, 144, 150, 153, 324, 351, 357, 375, 378, 390, or 393, or a functional fragment thereof, and
[0097] c. An amino acid molecule encoded by a nucleic acid molecule of SEQ ID NO: 44, 45, 47, 48, 50, 51, 53, 54, 124, 127, 136, 139, 145, 151, 154, 325, 358, 379, 394, 125, 128, 137, 140, 146, 152, 155, 326, 353, 359, 377, 380, 392, or 395 or a functional fragment thereof, and
[0098] d. An amino acid molecule encoded by a nucleic acid molecule having at least 50% identity to SEQ ID NO: 44, 45, 47, 48, 50, 51, 53, 54, 124, 127, 136, 139, 145, 151, 154, 325, 358, 379, 394, 125, 128, 137, 140, 146, 152, 155, 326, 353, 359, 377, 380, 392, or 395 or a functional fragment thereof, and
[0099] e. An amino acid molecule encoded by a nucleic acid molecule hybridizing under stringent conditions to a fragment of at least 250 bases complementary to SEQ ID NO: 44, 45, 47, 20 48, 50, 51, 53, 54, 124, 127, 136, 139, 145, 151, 154, 325, 358, 379, 394, 125, 128, 137, 140, 146, 152, 155, 326, 353, 359, 377, 380, 392, or 395 or a functional fragment thereof,
   wherein the amino acid molecule as defined in b., c., d. and e. is catalysing the reaction from isoprenol and/or prenol to isopentenylphosphate and/or dimethylallyl phosphate in an aqueous medium, wherein after incubation at least 10%, preferably at least 15%, more preferably at least 20%, even more preferably at least 25%, even more preferably at least 30%, even more preferably at least 35%, even more preferably at least 40%, even more preferably at least 45%, even more preferably at least 50%, even more preferably at least 55%, even more preferably at least 60%, even more preferably at least 65%, even more preferably at least 70%, even more preferably at least 75%, even more preferably at least 80%, even more preferably at least 85%, even more preferably at least 90%, even more preferably at least 95%, even more preferably at least 96%, 97%, 98%, 99% or 100% of the isoprenol and/or prenol have been converted to isopentenyl pyrophosphate and/or dimethylallyl pyrophosphate.

[0100] The incubation time of the aqueous medium may be at least 0.5 h, at least 1 h, at least 1.5 h, at least 2 h, at least 2.5 h, at least 5 h, at least 10 h or at least 12 h.

[0101] In one embodiment the incubation is performed at 10° C. to 50° C., preferably at 15° C. to 40° C., more preferably at 20° C. to 40° C., even more preferably at 24° C. to 37° C., most preferably at 36° C. to 38° C.

[0102] In a preferred embodiment after incubation for 10 hours at 37° C. at least 20% of the isoprenol and/or prenol have been converted to isopentenyl pyrophosphate and/or dimethylallyl pyrophosphate.

[0103] In a more preferred embodiment after incubation for 7 hours at 37° C. at least 20% of the isoprenol and/or prenol have been converted to isopentenyl pyrophosphate and/or dimethylallyl pyrophosphate. In an even more preferred embodiment after incubation for 7 hours at 37° C. at least 25% of the isoprenol and/or prenol have been converted to isopentenyl pyrophosphate and/or dimethylallyl pyrophosphate. In an even more preferred embodiment after incubation for 18 h at 37° C. at least 40% of the isoprenol and/or prenol have been converted to isopentenyl pyrophosphate and/or dimethylallyl pyrophosphate. In a most preferred embodiment after incubation for 5 hours at 37° C. at least 25% of the isoprenol and/or prenol have been converted to isopentenyl pyrophosphate and/or dimethylallyl pyrophosphate.

[0104] In one embodiment of the invention, the amino acid molecule as defined in b., c., d. and e comprises at a position corresponding to the respective position in SEQ ID NO: 37 no 14A, no 122A, no 174M and/or no 217T. Preferably the kinase 1 of the invention comprises at a position corresponding to the respective position in SEQ ID NO: 37 at least 3, preferably at least 4 of 14Y, K or T, 122S or T, 174K or V and/or 217E or M.

[0105] In a further embodiment of the invention, the amino acid molecule as defined in b., c., d. and e comprises at a position corresponding to the respective position in SEQ ID NO: 37 no 30D, E, S or Y, no 33G or S, no 125S or T and/or no 201A, I or S. Preferably the kinase 1 of the invention comprises at a position corresponding to the respective position in SEQ ID NO: 37 at least 2, preferably at least 3, preferably at least 4 of 30N, 33T, 125 K, and/or 201 C or D.

[0106] In a further process of the invention for producing isopentenyl pyrophosphate and/or dimethylallyl pyrophosphate or salt thereof the kinase 2 is comprising a sequence selected from the group consisting of
[0107] f. The amino acid molecule of SEQ ID NO: 76, 85, 88, 103, 138, 171, 174, 177, 180, 183, 189, 192, 195, 198, 201, 204, 207, 210, 216, 219, 222, 225, 228, 231, 234, 237, 240, 246, 249, 252, 255, 258, 261, 270, 273, 279, 282, 288, 426, 429, 435, 447, or 483, and
[0108] g. An amino acid molecule having at least 50% identity to the amino acid molecule of SEQ ID NO: 76, 85, 88, 103, 138, 171, 174, 177, 180, 183, 189, 192, 195, 198, 201, 204, 207, 210, 216, 219, 222, 225, 228, 231, 234, 237, 240, 246, 249, 252, 255, 258, 261, 270, 273, 279, 282, 288, 426, 429, 435, 447, or 483 or a functional fragment thereof, and
[0109] h. An amino acid molecule encoded by a nucleic acid molecule of SEQ ID NO: 77, 78, 86, 35 87, 89, 90, 104, 105, 139, 172, 175, 178, 181, 184, 190, 193, 196, 199, 202, 205, 208, 211, 217, 220, 223, 226, 229, 232, 235, 238, 241, 247, 250, 253, 256, 259, 262, 271, 274, 280, 283, 289, 430, 448, 484, 140, 173, 176, 179, 182, 185, 191, 194, 197, 200, 203, 206, 209, 212, 218, 221, 224, 227, 230, 233, 236, 239, 242, 248, 251, 254, 257, 260, 263, 272, 275, 281, 284, 290, 428, 431, 437, 449, or 485, or a functional fragment thereof, and
[0110] i. An amino acid molecule encoded by a nucleic acid molecule having at least 50% identity to SEQ ID NO: 77, 78, 86, 87, 89, 90, 104, 105, 139, 172, 175, 178, 181, 184, 190, 193, 196, 199, 202, 205, 208, 211, 217, 220, 223, 226, 229, 232, 235, 238, 241, 247, 250, 253, 256, 259, 262, 271, 274, 280, 283, 289, 430, 448, 484, 140, 173, 176, 179, 182, 185, 191, 194, 197, 200, 203, 206, 209, 212, 218, 221, 224, 227, 230, 233, 236, 239, 242, 248, 251, 254, 257, 260, 263, 272, 275, 281, 284, 290, 428, 431, 437, 449, or 485 or a functional fragment thereof, and
[0111] j. An amino acid molecule encoded by a nucleic acid molecule hybridizing under stringent conditions to a fragment of at least 250 bases complementary to SEQ ID NO: 77, 78, 86, 87, 89, 90, 104, 105, 139, 172, 175, 178, 181, 184, 190, 193, 196, 199, 202, 205, 208, 211, 217, 220, 223, 226, 229, 232, 235, 238, 241, 247, 250, 253, 256, 259, 262, 271, 274, 280, 283, 289, 430, 448, 484, 140, 173, 176, 179, 182, 185, 191, 194, 197, 200, 15 203, 206, 209, 212, 218, 221, 224, 227, 230, 233, 236, 239, 242, 248, 251, 254, 257, 260, 263, 272, 275, 281, 284, 290, 428, 431, 437, 449, or 485, or a functional fragment thereof,
   wherein the amino acid molecule as defined in g., h., i. and j. is catalysing the reaction from isopentenylphosphate and/or dimethylallyl phosphate to isopentenyl pyrophosphate and/or dimethylallyl pyrophosphate in an aqueous medium, wherein after incubation at least 10%, preferably at least 15%, more preferably at least 20%, even more preferably at least 25%, even more preferably at least 30%, even more preferably at least 35%, even more preferably at least 40%, even more preferably at least 45%, even more preferably at least 50%, even more preferably at least 55%, even more preferably at least 60%, even more preferably at least 65%, even more preferably at least 70%, even more preferably at least 75%, even more preferably at least 80%, even more preferably at least 85%, even more preferably at least 90%, even more preferably at least 95%, even more preferably at least 96%, 97%, 98%, 99% or 100% of the isoprenol and/or prenol have been converted to isopentenyl pyrophosphate and/or dimethylallyl pyrophosphate.

[0112] The incubation time of the aqueous medium may be at least 0.5 h, at least 1 h, at least 1.5 h, at least 2 h, at least 2.5 h, at least 5 h, at least 10 h or at least 12 h.

[0113] In one embodiment the incubation is performed at 10° C. to 50° C., preferably at 15° C. to 40° C., more preferably at 20° C. to 40° C., even more preferably at 24° C. to 37° C., most preferably at 36° C. to 38° C.

[0114] In a preferred embodiment after incubation for 10 hours at 37° C. at least 20% of the isoprenol and/or prenol have been converted to isopentenyl pyrophosphate and/or dimethylallyl pyrophosphate. In a more preferred embodiment after incubation for 7 hours at 37° C. at least 20% of the isoprenol and/or prenol have been converted to isopentenyl pyrophosphate and/or dimethylallyl pyrophosphate. In an even more preferred embodiment after incubation for 7 hours at 37° C. at least 25% of the isoprenol and/or prenol have been converted to isopentenyl pyrophosphate and/or dimethylallyl pyrophosphate. In an even more preferred embodiment after incubation for 18 h at 37° C. at least 40% of the isoprenol and/or prenol have been converted to isopentenyl pyrophosphate and/or dimethylallyl pyrophosphate. In a most preferred embodiment after incubtion for 5 hours at 37° C. at least 25% of the isoprenol and/or prenol have been converted to isopentenyl pyrophosphate and/or dimethylallyl pyrophosphate.

[0115] An additional embodiment of the invention is a process for producing isopentenyl pyrophosphate and/or dimethylallyl pyrophosphate or salt thereof comprising the steps of
[0116] i. Providing an aqueous medium comprising water, one or more kinase 1, one or more kinase 2 and isoprenol and/or prenol and optionally a nucleotide triphosphate, preferably ATP and a divalent cation, preferably Mg2 and,
[0117] ii. Incubating the aqueous medium and
[0118] iii. Optionally isolating the isopentenyl pyrophosphate and/or dimethylallyl pyrophosphate or salt thereof from the reaction mixture,
   wherein the one or more kinase 1 is selected from the group consisting of
[0119] a. The amino acid molecule of SEQ ID NO: 43, 46, 49, 52, 123, 126, 135, 138, 144, 150, 153, 324, 351, 357, 375, 378, 390, or 393 and
[0120] b. An amino acid molecule having at least 50% identity to the amino acid molecule of SEQ ID NO: 43, 46, 49, 52, 123, 126, 135, 138, 144, 150, 153, 324, 351, 357, 375, 378, 390, or 393, or a functional fragment thereof, and
[0121] c. An amino acid molecule encoded by a nucleic acid molecule of SEQ ID NO: 44, 45, 47, 48, 50, 51, 53, 54, 124, 127, 136, 139, 145, 151, 154, 325, 358, 379, 394, 125, 128, 137, 140, 146, 152, 155, 326, 353, 359, 377, 380, 392, or 395 or a functional fragment thereof, and
[0122] d. An amino acid molecule encoded by a nucleic acid molecule having at least 50% identity to SEQ ID NO: 44, 45, 47, 48, 50, 51, 53, 54, 124, 127, 136, 139, 145, 151, 154, 325, 358, 379, 394, 125, 128, 137, 140, 146, 152, 155, 326, 353, 359, 377, 380, 392, or 395 or a functional fragment thereof, and
[0123] e. An amino acid molecule encoded by a nucleic acid molecule hybridizing under stringent conditions to a fragment of at least 250 bases complementary to SEQ ID NO: 44, 45, 47, 48, 50, 51, 53, 54, 124, 127, 136, 139, 145, 151, 154, 325, 358, 379, 394, 125, 128, 137, 140, 146, 152, 155, 326, 353, 359, 377, 380, 392, or 395 or a functional fragment thereof,
   wherein the amino acid molecule as defined in b., c., d. and e. is catalysing the reaction from isoprenol and/or prenol to isopentenylphosphate and/or dimethylallyl phosphate in an aqueous medium.

[0124] In one embodiment of the invention, the amino acid molecule as defined in b., c., d. and e comprises at a position corresponding to the respective position in SEQ ID NO: 37 no 14A, no 122A, no 174M and/or no 217T. Preferably the kinase 1 of the invention comprises at a position corresponding to the respective position in SEQ ID NO: 37 at least 3, preferably at least 4 of 14Y, K or T, 122S or T, 174K or V and/or 217E or M.

[0125] In a further embodiment of the invention, the amino acid molecule as defined in b., c., d. and e comprises at a position corresponding to the respective position in SEQ ID NO: 37 no 30D, E, S or Y, no 33G or S, no 125S or T and/or no 201A, I or S. Preferably the kinase 1 of the invention comprises at a position corresponding to the respective position in SEQ ID NO: 37 at least 2, preferably at least 3, preferably at least 4 of 30N, 33T, 125 K, and/or 201 C or D.

[0126] In a further process of the invention for producing isopentenyl pyrophosphate and/or dimethylallyl pyrophosphate and the kinase 2 is comprising a sequence selected from the group consisting of
[0127] f. The amino acid molecule of SEQ ID NO: 76, 85, 88, 103, 138, 171, 174, 177, 180, 183, 189, 192, 195, 198, 201, 204, 207, 210, 216, 219, 222, 225, 228, 231, 234, 237, 240, 246, 249, 252, 255, 258, 261, 270, 273, 279, 282, 288, 426, 429, 435, 447, or 483, and
[0128] g. An amino acid molecule having at least 50% identity to the amino acid molecule of SEQ ID NO: 76, 85, 88, 103, 138, 171, 174, 177, 180, 183, 189, 192, 195, 198, 201, 204, 20 207, 210, 216, 219, 222, 225, 228, 231, 234, 237, 240, 246, 249, 252, 255, 258, 261, 270, 273, 279, 282, 288, 426, 429, 435, 447, or 483 or a functional fragment thereof, and
[0129] h. An amino acid molecule encoded by a nucleic acid molecule of SEQ ID NO: 77, 78, 86, 87, 89, 90, 104,105, 139, 172, 175, 178, 181, 184, 190, 193, 196, 199, 202, 205, 208, 25 211, 217, 220, 223, 226, 229, 232, 235, 238, 241, 247, 250, 253, 256, 259, 262, 271, 274, 280, 283, 289, 430, 448, 484, 140, 173, 176, 179, 182, 185, 191, 194, 197, 200, 203, 206, 209, 212, 218, 221, 224, 227, 230, 233, 236, 239, 242, 248, 251, 254, 257, 260, 263, 272, 275, 281, 284, 290, 428, 431, 437, 449, or 485, or a functional fragment thereof, and
[0130] i. An amino acid molecule encoded by a nucleic acid molecule having at least 50% identity to SEQ ID NO: 77, 78, 86, 87, 89, 90, 104, 105, 139, 172, 175, 178, 181, 184, 190, 193, 196, 199, 202, 205, 208, 211, 217, 220, 223, 226, 229, 232, 235, 238, 241, 247, 250, 253, 256, 259, 262, 271, 274, 280, 283, 289, 430, 448, 484, 140, 173, 176, 179, 182, 185, 191, 194, 197, 200, 203, 206, 209, 212, 218, 221, 224, 227, 230, 233, 236, 239, 35 242, 248, 251, 254, 257, 260, 263, 272, 275, 281, 284, 290, 428, 431, 437, 449, or 485, or a functional fragment thereof, and
[0131] j. An amino acid molecule encoded by a nucleic acid molecule hybridizing under stringent conditions to a fragment of at least 250 bases complementary to SEQ ID NO: 77, 78, 86, 87, 89, 90, 104, 105, 139, 172, 175, 178, 181, 184, 190, 193, 196, 199, 202, 205, 208, 211, 217, 220, 223, 226, 229, 232, 235, 238, 241, 247, 250, 253, 256, 259, 262, 271, 274, 280, 283, 289, 430, 448, 484, 140, 173, 176, 179, 182, 185, 191, 194, 197, 200, 203, 206, 209, 212, 218, 221, 224, 227, 230, 233, 236, 239, 242, 248, 251, 254, 257, 260, 263, 272, 275, 281, 284, 290, 428, 431, 437, 449, or 485, or a functional fragment thereof,
   wherein the amino acid molecule as defined in g., h., i. and j. is catalysing the reaction from isopentenylphosphate and/or dimethylallyl phosphate to isopentenyl pyrophosphate and/or dimethylallyl pyrophosphate in an aqueous medium.

[0132] In a preferred embodiment, kinase 1 comprises an amino acid sequence having at least 50%, 51%, 52%, 53%, 54%, 55%, 56%, 57%, 58%, 59%, 60%, 61%, 62%, 63%, 64%, 65%, 66%, 67%, 68%, 69%, 70%, 71%, 72%, 73%, 74%, 75%, 76%, 77%, 78%, 79%, 80%, 81%, 82%, 83%, 84%, 85%, 86%, 87%, 88%, 89%, 90%, 91%, 92%, 93%, 94%, 95%, 96%, 97%, 98%, 99%, or more sequence identity to SEQ ID NO: 37, or a functional variant thereof, and

kinase 2 comprises an amino acid sequence having at least 50%, 51%, 52%, 53%, 54%, 55%, 56%, 57%, 58%, 59%, 60%, 61%, 62%, 63%, 64%, 65%, 66%, 67%, 68%, 69%, 70%, 71%, 72%, 73%, 74%, 75%, 76%, 77%, 78%, 79%, 80%, 81%, 82%, 83%, 84%, 85%, 86%, 87%, 88%, 89%, 90%, 91%, 92%, 93%, 94%, 95%, 96%, 97%, 98%, 99%, or more sequence identity to SEQ ID NO: 85, or a functional variant thereof

[0133] In another preferred embodiment, kinase 1 comprises an amino acid sequence having at least 50%, 51%, 52%, 53%, 54%, 55%, 56%, 57%, 58%, 59%, 60%, 61%, 62%, 63%, 64%, 65%, 66%, 67%, 68%, 69%, 70%, 71%, 72%, 73%, 74%, 75%, 76%, 77%, 78%, 79%, 80%, 81%, 82%, 83%, 84%, 85%, 86%, 87%, 88%, 89%, 90%, 91%, 92%, 93%, 94%, 95%, 96%, 97%, 98%, 99%, or more sequence identity to SEQ ID NO: 1, or a functional variant thereof, and

kinase 2 comprises an amino acid sequence having at least 50%, 51%, 52%, 53%, 54%, 55%, 56%, 57%, 58%, 59%, 60%, 61%, 62%, 63%, 64%, 65%, 66%, 67%, 68%, 69%, 70%, 71%, 72%, 73%, 74%, 75%, 76%, 77%, 78%, 79%, 80%, 81%, 82%, 83%, 84%, 85%, 86%, 87%, 88%, 89%, 90%, 91%, 92%, 93%, 94%, 95%, 96%, 97%, 98%, 99%, or more sequence identity to SEQ ID NO: 486, or a functional variant thereof

[0134] In another preferred embodiment, kinase 1 comprises an amino acid sequence having at least 50%, 51%, 52%, 53%, 54%, 55%, 56%, 57%, 58%, 59%, 60%, 61%, 62%, 63%, 64%, 65%, 66%, 67%, 68%, 69%, 70%, 71%, 72%, 73%, 74%, 75%, 76%, 77%, 78%, 79%, 80%, 81%, 82%, 83%, 84%, 85%, 86%, 87%, 88%, 89%, 90%, 91%, 92%, 93%, 94%, 95%, 96%, 97%, 98%, 99%, or more sequence identity to SEQ ID NO: 291, or a functional variant thereof, and

kinase 2 comprises an amino acid sequence having at least 50%, 51%, 52%, 53%, 54%, 55%, 56%, 57%, 58%, 59%, 60%, 61%, 62%, 63%, 64%, 65%, 66%, 67%, 68%, 69%, 70%, 71%, 72%, 73%, 74%, 75%, 76%, 77%, 78%, 79%, 80%, 81%, 82%, 83%, 84%, 85%, 86%, 87%, 88%, 89%, 90%, 91%, 92%, 93%, 94%, 95%, 96%, 97%, 98%, 99%, or more sequence identity to SEQ ID NO: 103, or a functional variant thereof

[0135] In another preferred embodiment, kinase 1 comprises an amino acid sequence having at least 50%, 51%, 52%, 53%, 54%, 55%, 56%, 57%, 58%, 59%, 60%, 61%, 62%, 63%, 64%, 65%, 66%, 67%, 68%, 69%, 70%, 71%, 72%, 73%, 74%, 75%, 76%, 77%, 78%, 79%, 80%, 81%, 82%, 83%, 84%, 85%, 86%, 87%, 88%, 89%, 90%, 91%, 92%, 93%, 94%, 95%, 96%, 97%, 98%, 99%, or more sequence identity to SEQ ID NO: 46, or a functional variant thereof, and

kinase 2 comprises an amino acid sequence having at least 50%, 51%, 52%, 53%, 54%, 55%, 56%, 57%, 58%, 59%, 60%, 61%, 62%, 63%, 64%, 65%, 66%, 67%, 68%, 69%, 70%, 71%, 72%, 73%, 74%, 75%, 76%, 77%, 78%, 79%, 80%, 81%, 82%, 83%, 84%, 85%, 86%, 87%, 88%, 89%, 90%, 91%, 92%, 93%, 94%, 95%, 96%, 97%, 98%, 99%, or more sequence identity to SEQ ID NO: 88, or a functional variant thereof

[0136] In another preferred embodiment, kinase 1 comprises an amino acid sequence having at least 50%, 51%, 52%, 53%, 54%, 55%, 56%, 57%, 58%, 59%, 60%, 61%, 62%, 63%, 64%, 65%, 66%, 67%, 68%, 69%, 70%, 71%, 72%, 73%, 74%, 75%, 76%, 77%, 78%, 79%, 80%, 81%, 82%, 83%, 84%, 85%, 86%, 87%, 88%, 89%, 90%, 91%, 92%, 93%, 94%, 95%, 96%, 97%, 98%, 99%, or more sequence identity to SEQ ID NO: 49, or a functional variant thereof, and

kinase 2 comprises an amino acid sequence having at least 50%, 51%, 52%, 53%, 54%, 55%, 56%, 57%, 58%, 59%, 60%, 61%, 62%, 63%, 64%, 65%, 66%, 67%, 68%, 69%, 70%, 71%, 72%, 73%, 74%, 75%, 76%, 77%, 78%, 79%, 80%, 81%, 82%, 83%, 84%, 85%, 86%, 87%, 88%, 89%, 90%, 91%, 92%, 93%, 94%, 95%, 96%, 97%, 98%, 99%, or more sequence identity to SEQ ID NO: 88, or a functional variant thereof

[0137] The aqueous medium may be a solution or a suspension or a solution and a suspension, wherein any of the substances comprised in said aqueous medium may be fully or partially dissolved and/or partially or fully suspended.

[0138] A further embodiment of the invention is a recombinant construct comprising a kinase 1 and a kinase 2 wherein the kinase 1 is comprising a sequence encoding an amino acid molecule selected from the group consisting of
[0139] a. The amino acid molecule of SEQ ID NO: 43, 46, 49, 52, 123, 126, 135, 138, 144, 150, 153, 324, 351, 357, 375, 378, 390, or 393 and
[0140] b. An amino acid molecule having at least 50% identity to the amino acid molecule of SEQ ID NO: 43, 46, 49,52, 43, 46, 49, 52, 123, 126, 135, 138, 144, 150, 153, 324, 351, 357, 375, 378, 390, or 393, or a functional fragment thereof, and
[0141] c. An amino acid molecule encoded by a nucleic acid molecule of SEQ ID NO: 44, 45, 47, 48, 50, 51, 53, 54, 124, 127, 136, 139, 145, 151, 154, 325, 358, 379, 394, 125, 128, 137, 140, 146, 152, 155, 326, 353, 359, 377, 380, 392, or 395 or a functional fragment thereof, and
[0142] d. An amino acid molecule encoded by a nucleic acid molecule having at least 50% identity to SEQ ID NO: 44, 45, 47, 48, 50, 51, 53, 54, 124, 127, 136, 139, 145, 151, 154, 325, 358, 379, 394, 125, 128, 137, 140, 146, 152, 155, 326, 353, 359, 377, 380, 392, or 395 or a functional fragment thereof, and
[0143] e. An amino acid molecule encoded by a nucleic acid molecule hybridizing under stringent conditions to a fragment of at least 250 bases complementary to SEQ ID NO: 44, 45, 47, 48, 50, 51, 53, 54, 124, 127, 136, 139, 145, 151, 154, 325, 358, 379, 394, 125, 128, 137, 140, 146, 152, 155, 326, 353, 359, 377, 380, 392, or 395 or a functional fragment thereof,
   wherein the amino acid molecule as defined in b., c., d. and e. is catalysing the reaction from isoprenol and/or prenol to isopentenylphosphate and/or dimethylallyl phosphate in an aqueous medium.

[0144] In one embodiment of the invention, the amino acid molecule as defined in b., c., d. and e comprises at a position corresponding to the respective position in SEQ ID NO: 37 no 14A, no 122A, no 174M and/or no 217T. Preferably the kinase 1 of the invention comprises at a position corresponding to the respective position in SEQ ID NO: 37 at least 3, preferably at least 4 of 14Y, K or T, 122S or T, 174K or V and/or 217E or M.

[0145] In a further embodiment of the invention, the amino acid molecule as defined in b., c., d. and e comprises at a position corresponding to the respective position in SEQ ID NO: 37 no 30D, E, S or Y, no 33G or S, no 125S or T and/or no 201A, I or S. Preferably the kinase 1 of the invention comprises at a position corresponding to the respective position in SEQ ID NO: 37 at least 2, preferably at least 3, preferably at least 4 of 30N, 33T, 125 K, and/or 201 C or D.

[0146] In one embodiment of the recombinant construct comprising a kinase 1 and a kinase 2 the kinase 2 is comprising a sequence encoding an amino acid molecule selected from the group consisting of
[0147] f. The amino acid molecule of SEQ ID NO: 76, 85, 88, 103, 138, 171, 174, 177, 180, 183, 189, 192, 195, 198, 201, 204, 207, 210, 216, 219, 222, 225, 228, 231, 234, 237, 240, 246, 249, 252, 255, 258, 261, 270, 273, 279, 282, 288, 426, 429, 435, 447, or 483, and
[0148] g. An amino acid molecule having at least 50% identity to the amino acid molecule of SEQ ID NO: 76, 85, 88, 103, 138, 171, 174, 177, 180, 183, 189, 192, 195, 198, 201, 204, 207, 210, 216, 219, 222, 225, 228, 231, 234, 237, 240, 246, 249, 252, 255, 258, 261, 270, 273, 279, 282, 288, 426, 429, 435, 447, or 483 or a functional fragment thereof, and
[0149] h. An amino acid molecule encoded by a nucleic acid molecule of SEQ ID NO: 77, 78, 86, 87, 89, 90, 104, 105, 139, 172, 175, 178, 181, 184, 190, 193, 196, 199, 202, 205, 208, 211, 217, 220, 223, 226, 229, 232, 235, 238, 241, 247, 250, 253, 256, 259, 262, 271, 274, 280, 283, 289, 430, 448, 484, 140, 173, 176, 179, 182, 185, 191, 194, 197, 200, 203, 206, 209, 212, 218, 221, 224, 227, 230, 233, 236, 239, 242, 248, 251, 254, 257, 260, 263, 272, 275, 281, 284, 290, 428, 431, 437, 449, or 485 , or a functional fragment thereof, and
[0150] i. An amino acid molecule encoded by a nucleic acid molecule having at least 50% identity to SEQ ID NO: 77, 78, 86, 87, 89, 90, 104, 105, 139, 172, 175, 178, 181, 184, 190, 193, 196, 199, 202, 205, 208, 211, 217, 220, 223, 226, 229, 232, 235, 238, 241, 247, 250, 253, 256, 259, 262, 271, 274, 280, 283, 289, 430, 448, 484, 140, 173, 176, 179, 182, 185, 191, 194, 197, 200, 203, 206, 209, 212, 218, 221, 224, 227, 230, 233, 236, 239, 242, 248, 251, 254, 257, 260, 263, 272, 275, 281, 284, 290, 428, 431, 437, 449, or 485 , or a functional fragment thereof, and
[0151] j. An amino acid molecule encoded by a nucleic acid molecule hybridizing under stringent conditions to a fragment of at least 250 bases complementary to SEQ ID NO: 77, 78, 86, 87, 89, 90, 104, 105, 139, 172, 175, 178, 181, 184, 190, 193, 196, 199, 202, 205, 208, 211, 217, 220, 223, 226, 229, 232, 235, 238, 241, 247, 250, 253, 256, 259, 262, 271, 274, 280, 283, 289, 430, 448, 484, 140, 173, 176, 179, 182, 185, 191, 194, 197, 200, 203, 206, 209, 212, 218, 221, 224, 227, 230, 233, 236, 239, 242, 248, 251, 254, 257, 260, 263, 272, 275, 281, 284, 290, 428, 431, 437, 449, or 485 , or a functional fragment thereof,
   wherein the amino acid molecule as defined in g., h., i. and j. is catalysing the reaction from isopentenylphosphate and/or dimethylallyl phosphate to isopentenyl pyrophosphate and/or dimethylallyl pyrophosphate in an aqueous medium.

[0152] In a preferred embodiment, kinase 1 comprises an amino acid sequence having at least 50%, 51%, 52%, 53%, 54%, 55%, 56%, 57%, 58%, 59%, 60%, 61%, 62%, 63%, 64%, 65%, 66%, 67%, 68%, 69%, 70%, 71%, 72%, 73%, 74%, 75%, 76%, 77%, 78%, 79%, 80%, 81%, 82%, 83%, 84%, 85%, 86%, 87%, 88%, 89%, 90%, 91%, 92%, 93%, 94%, 95%, 96%, 97%, 98%, 99%, or more sequence identity to SEQ ID NO: 37, or a functional variant thereof, and

kinase 2 comprises an amino acid sequence having at least 50%, 51%, 52%, 53%, 54%, 55%, 56%, 57%, 58%, 59%, 60%, 61%, 62%, 63%, 64%, 65%, 66%, 67%, 68%, 69%, 70%, 71%, 72%, 73%, 74%, 75%, 76%, 77%, 78%, 79%, 80%, 81%, 82%, 83%, 84%, 85%, 86%, 87%, 88%, 89%, 90%, 91%, 92%, 93%, 94%, 95%, 96%, 97%, 98%, 99%, or more sequence identity to SEQ ID NO: 85, or a functional variant thereof

[0153] In another preferred embodiment, kinase 1 comprises an amino acid sequence having at least 50%, 51%, 52%, 53%, 54%, 55%, 56%, 57%, 58%, 59%, 60%, 61%, 62%, 63%, 64%, 65%, 66%, 67%, 68%, 69%, 70%, 71%, 72%, 73%, 74%, 75%, 76%, 77%, 78%, 79%, 80%, 81%, 82%, 83%, 84%, 85%, 86%, 87%, 88%, 89%, 90%, 91%, 92%, 93%, 94%, 95%, 96%, 97%, 98%, 99%, or more sequence identity to SEQ ID NO: 1, or a functional variant thereof, and

kinase 2 comprises an amino acid sequence having at least 50%, 51%, 52%, 53%, 54%, 55%, 56%, 57%, 58%, 59%, 60%, 61%, 62%, 63%, 64%, 65%, 66%, 67%, 68%, 69%, 70%, 71%, 72%, 73%, 74%, 75%, 76%, 77%, 78%, 79%, 80%, 81%, 82%, 83%, 84%, 85%, 86%, 87%, 88%, 89%, 90%, 91%, 92%, 93%, 94%, 95%, 96%, 97%, 98%, 99%, or more sequence identity to SEQ ID NO: 486, or a functional variant thereof

[0154] In another preferred embodiment, kinase 1 comprises an amino acid sequence having at least 50%, 51%, 52%, 53%, 54%, 55%, 56%, 57%, 58%, 59%, 60%, 61%, 62%, 63%, 64%, 65%, 66%, 67%, 68%, 69%, 70%, 71%, 72%, 73%, 74%, 75%, 76%, 77%, 78%, 79%, 80%, 81%, 82%, 83%, 84%, 85%, 86%, 87%, 88%, 89%, 90%, 91%, 92%, 93%, 94%, 95%, 96%, 97%, 98%, 99%, or more sequence identity to SEQ ID NO: 291, or a functional variant thereof, and

kinase 2 comprises an amino acid sequence having at least 50%, 51%, 52%, 53%, 54%, 55%, 56%, 57%, 58%, 59%, 60%, 61%, 62%, 63%, 64%, 65%, 66%, 67%, 68%, 69%, 70%, 71%, 72%, 73%, 74%, 75%, 76%, 77%, 78%, 79%, 80%, 81%, 82%, 83%, 84%, 85%, 86%, 87%, 88%, 89%, 90%, 91%, 92%, 93%, 94%, 95%, 96%, 97%, 98%, 99%, or more sequence identity to SEQ ID NO: 103, or a functional variant thereof

[0155] In another preferred embodiment, kinase 1 comprises an amino acid sequence having at least 50%, 51%, 52%, 53%, 54%, 55%, 56%, 57%, 58%, 59%, 60%, 61%, 62%, 63%, 64%, 65%, 66%, 67%, 68%, 69%, 70%, 71%, 72%, 73%, 74%, 75%, 76%, 77%, 78%, 79%, 80%, 81%, 82%, 83%, 84%, 85%, 86%, 87%, 88%, 89%, 90%, 91%, 92%, 93%, 94%, 95%, 96%, 97%, 98%, 99%, or more sequence identity to SEQ ID NO: 46, or a functional variant thereof, and

kinase 2 comprises an amino acid sequence having at least 50%, 51%, 52%, 53%, 54%, 55%, 56%, 57%, 58%, 59%, 60%, 61%, 62%, 63%, 64%, 65%, 66%, 67%, 68%, 69%, 70%, 71%, 72%, 73%, 74%, 75%, 76%, 77%, 78%, 79%, 80%, 81%, 82%, 83%, 84%, 85%, 86%, 87%, 88%, 89%, 90%, 91%, 92%, 93%, 94%, 95%, 96%, 97%, 98%, 99%, or more sequence identity to SEQ ID NO: 88, or a functional variant thereof

[0156] In another preferred embodiment, kinase 1 comprises an amino acid sequence having at least 50%, 51%, 52%, 53%, 54%, 55%, 56%, 57%, 58%, 59%, 60%, 61%, 62%, 63%, 64%, 65%, 66%, 67%, 68%, 69%, 70%, 71%, 72%, 73%, 74%, 75%, 76%, 77%, 78%, 79%, 80%, 81%, 82%, 83%, 84%, 85%, 86%, 87%, 88%, 89%, 90%, 91%, 92%, 93%, 94%, 95%, 96%, 97%, 98%, 99%, or more sequence identity to SEQ ID NO: 49, or a functional variant thereof, and

kinase 2 comprises an amino acid sequence having at least 50%, 51%, 52%, 53%, 54%, 55%, 56%, 57%, 58%, 59%, 60%, 61%, 62%, 63%, 64%, 65%, 66%, 67%, 68%, 69%, 70%, 71%, 72%, 73%, 74%, 75%, 76%, 77%, 78%, 79%, 80%, 81%, 82%, 83%, 84%, 85%, 86%, 87%, 88%, 89%, 90%, 91%, 92%, 93%, 94%, 95%, 96%, 97%, 98%, 99%, or more sequence identity to SEQ ID NO: 88, or a functional variant thereof

[0157] In a further embodiment of the recombinant construct comprising a kinase 1 and a kinase 2 each the kinase 1 and the kinase 2 are functionally linked to a heterologous regulatory element, for example a promoter, a terminator, an enhancer or any other heterologous element.

[0158] Another embodiment of the invention is a recombinant vector comprising the recombinant construct comprising a kinase 1 and a kinase 2 wherein each the kinase 1 and the kinase 2 are functionally linked to a heterologous for example a promoter, a terminator, an enhancer or any other heterologous element.

[0159] In a particularly preferred embodiment, said vector comprises the sequence of SEQ ID NO: 109, 110, or 491.

[0160] Another embodiment of the invention is a recombinant microorganism comprising a recombinant construct comprising a kinase 1 and a kinase 2 wherein each the kinase 1 and the kinase 2 are functionally linked to a heterologous regulatory element or comprising the recombinant vector comprising said recombinant construct.

[0161] The recombinant microorganism comprising a recombinant construct comprising a kinase 1 and a kinase 2 wherein each the kinase 1 and the kinase 2 are functionally linked to a heterologous regulatory element or comprising the recombinant vector comprising said recombinant construct is preferably selected from the list comprising, Gluconobacter oxydans, Gluconobacter asaii, Achromobacter delmarvae, Achromobacter viscosus, Achromobacter lacticum, Agrobacterium tumefaciens, Agrobacterium radiobacter, Alcaligenes faecalis, Arthrobacter citreus, Arthrobacter tumescens, Arthrobacter paraffineus, Arthrobacter hydrocarboglutamicus, Arthrobacter oxydans, Aureobacterium saperdae, Azotobacter indicus, Brevibacterium ammoniagenes, Brevibacterium divaricatum, Brevibacterium lactofermentum, Brevibacterium flavum, Brevibacterium globosum, Brevibacterium fuscum, Brevibacterium ketoglutamicum, Brevibacterium helcolum, Brevibacterium pusillum, Brevibacterium testaceum, Brevibacterium roseum, Brevibacterium immariophilium, Brevibacterium linens, Brevibacterium protopharmiae, Corynebacterium acetophilum, Corynebacterium glutamicum, Corynebacterium callunae, Corynebacterium acetoacidophilum, Corynebacterium acetoglutamicum, Enterobacter aerogenes, Erwinia amylovora, Erwinia carotovora, Erwinia herbicola, Erwinia chrysanthemi, Flavobacterium peregrinum, Flavobacterium fucatum, Flavobacterium aurantinum, Flavobacterium rhenanum, Flavobacterium sewanense, Flavobacterium breve, Flavobacterium meningosepticum, Micrococcus sp. CCM825, Morganella morganii, Nocardia opaca, Nocardia rugosa, Planococcus eucinatus, Proteus rettgeri, Propionibacterium shermanii, Pseudomonas synxantha, Pseudomonas azotoformans, Pseudomonas jluorescens, Pseudomonas ovalis, Pseudomonas stutzeri, Pseudomonas acidovolans, Pseudomonas mucidolens, Pseudomonas testosteroni, Pseudomonas aeruginosa, Rhodococcus erythropolis, Rhodococcus rhodochrous, Rhodococcus sp. ATCC 15592, Rhodococcus sp. ATCC 19070, Sporosarcina ureae, Staphylococcus aureus, Vibrio metschnikovii, Vibrio tyrogenes, Actinomadura madurae, Actinomyces violaceochromogenes, Kitasatosporia parulosa, Streptomyces avermitilis, Streptomyces coelicolor, Streptomyces flavelus, Streptomyces griseolus, Streptomyces lividans, Streptomyces olivaceus, Streptomyces tanashiensis, Streptomyces virginiae, Streptomyces antibioticus, Streptomyces cacaoi, Streptomyces lavendulae, Streptomyces viridochromogenes, Aeromonas salmonicida, Bacillus pumilus, Bacillus circulans, Bacillus thiaminolyticus, Escherichia freundii, Microbacterium ammoniaphilum, Serratia marcescens, Salmonella typhimurium, Salmonella schottmulleri, Xanthomonas citri, Synechocystis sp., Synechococcus elongatus, Thermosynechococcus elongatus, Microcystis aeruginosa, Nostoc sp., N. commune, N.sphaericum, Nostoc punctiforme , Spirulina platensis, Lyngbya majuscula, L. lagerheimii, Phormidium tenue, Anabaena sp., Leptolyngbya sp., Saccharomyces spec, such as Saccharomyces cerevisiae, Hansenula spec, such as Hansenula polymorpha, Schizosaccharomyces spec, such as Schizosaccharomyces pombe, Kluyveromyces spec, such as Kluyveromyces lactis and Kluyveromyces marxianus, Yarrowia spec, such as Yarrowia lipolytica, Pichia spec, such as Pichia methanolica, Pichia stipites and Pichia pastoris, Zygosaccharomyces spec, such as Zygosaccharomyces rouxii and Zygosaccharomyces bailii, Candida spec, such as Candida boidinii, Candida utilis, Candida freyschussii, Candida glabrata and Candida sonorensis, Schwanniomyces spec, such as Schwanniomyces occidentalis, Arxula spec, such as Arxula adeninivorans, Ogataea spec such as Ogataea minuta, Klebsiella spec, such as Klebsiella pneumonia, Aspergillus spec. such as Aspergillus niger or Myceliophthora thermophila.

[0162] More preferably the recombinant microorganism is Rhodococcus rhodochrous, Aerococcus sp., Aspergillus sp., Bacillus pumilus, Bacillus subtilis, Bacteroides thetaiotaomicron, Clostridium algidicarnis, Corynebacterium efficiens, Corynebacterium glutamicum, Escherichia coli, Haloferax volcanii, Lactobacillus casei, Methanocaldococcus jannaschii, Methanothermobacter thermautotrophicus, Myceliophthora thermophila, Pichia pastoris, Pseudomonas synxantha, Pseudomonas azotoformans, Pseudomonas jluorescens, Pseudomonas ovalis, Pseudomonas stutzeri, Pseudomonas acidovolans, Pseudomonas mucidolens, Pseudomonas testosteroni, Pseudomonas aeruginosa, Pseudozyma tsukubaensis, Ralstonia eutropha, Rhodobacter sphaeroides, Rhodococcus opacus, Saccharomyces cerevisiae, Shigella boydii, Sinorhizobium meliloti, Streptomyces antibioticus, Streptomyces avermitilis, Streptomyces cacaoi, Streptomyces coelicolor, Streptomyces flavelus, Streptomyces griseolus, Streptomyces lavendulae, Streptomyces lividans, Streptomyces olivaceus, Streptomyces tanashiensis, Streptomyces virginiae, Streptomyces viridochromogenes, Thermoplasma acidophilum, Vibrio natrigens or Yarrowia lipolytica. Especially preferred microorganisms are Bacillus subtilis, Corynebacterium glutamicum, Escherichia coli, Pseudomonas aeruginosa, Pseudomonas putida, Rhodobacter sphaeroides, Rhodococcus opacus, Saccharomyces cerevisiae and Yarrowia lipolytica.

[0163] Another embodiment of the invention is a composition comprising water, one or more kinase 1, one or more kinase 2, isoprenol and/or prenol and optionally a nucleotide triphosphate, preferably ATP and a divalent cation, preferably Mg2wherein the kinase 1 is selected from the group consisting of
[0164] a. The amino acid molecule of SEQ ID NO: 43, 46, 49, 52, 123, 126, 135, 138, 144, 150, 153, 324, 351, 357, 375, 378, 390, or 393 and
[0165] b. An amino acid molecule having at least 50% identity to the amino acid molecule of SEQ ID NO: 43, 46, 49, 52, 123, 126, 135, 138, 144, 150, 153, 324, 351, 357, 375, 378, 390, or 393, or a functional fragment thereof, and
[0166] c. An amino acid molecule encoded by a nucleic acid molecule of SEQ ID NO: 44, 45, 47, 48, 50, 51, 53, 54, 124, 127, 136, 139, 145, 151, 154, 325, 358, 379, 394, 125, 128, 137, 140, 146, 152, 155, 326, 353, 359, 377, 380, 392, or 395 or a functional fragment thereof, and
[0167] d. An amino acid molecule encoded by a nucleic acid molecule having at least 50% identity to SEQ ID NO: 44, 45, 47, 48, 50, 51, 53, 54, 124, 127, 136, 139, 145, 151, 154, 325, 358, 379, 394, 125, 128, 137, 140, 146, 152, 155, 326, 353, 359, 377, 380, 392, or 395 or a functional fragment thereof, and
[0168] e. An amino acid molecule encoded by a nucleic acid molecule hybridizing under stringent conditions to a fragment of at least 250 bases complementary to SEQ ID NO: 44, 45, 47, 48, 50, 51, 53, 54, 124, 127, 136, 139, 145, 151, 154, 325, 358, 379, 394, 125, 128, 137, 140, 146, 152, 155, 326, 353, 359, 377, 380, 392, or 395 or a functional fragment thereof,
   wherein the amino acid molecule as defined in b., c., d. and e. is catalysing the reaction from isoprenol and/or prenol to isopentenylphosphate and/or dimethylallyl phosphate in an aqueous medium.

[0169] In one embodiment of the invention, the amino acid molecule as defined in b., c., d. and e comprises at a position corresponding to the respective position in SEQ ID NO: 37 no 14A, no 122A, no 174M and/or no 217T. Preferably the kinase 1 of the invention comprises at a position corresponding to the respective position in SEQ ID NO: 37 at least 3, preferably at least 4 of 14Y, K or T, 122S or T, 174K or V and/or 217E or M.

[0170] In a further embodiment of the invention, the amino acid molecule as defined in b., c., d. and e comprises at a position corresponding to the respective position in SEQ ID NO: 37 no 30D, E, S or Y, no 33G or S, no 125S or T and/or no 201A, I or S. Preferably the kinase 1 of the invention comprises at a position corresponding to the respective position in SEQ ID NO: 37 at least 2, preferably at least 3, preferably at least 4 of 30N, 33T, 125 K, and/or 201 C or D.

[0171] In a further embodiment of the composition comprising water, one or more kinase 1, one or more kinase 2, isoprenol and/or prenol and optionally a nucleotide triphosphate, preferably ATP and a divalent cation, preferably Mg2the kinase 2 is selected from the group consisting of
[0172] f. The amino acid molecule of SEQ ID NO: 76, 85, 88, 103, 138, 171, 174, 177, 180, 183, 189, 192, 195, 198, 201, 204, 207, 210, 216, 219, 222, 225, 228, 231, 234, 237, 240, 246, 249, 252, 255, 258, 261, 270, 273, 279, 282, 288, 426, 429, 435, 447, or 483, and
[0173] g. An amino acid molecule having at least 50% identity to the amino acid molecule of SEQ ID NO: 76, 85, 88, 103, 138, 171, 174, 177, 180, 183, 189, 192, 195, 198, 201, 204, 207, 210, 216, 219, 222, 225, 228, 231, 234, 237, 240, 246, 249, 252, 255, 258, 261, 270, 273, 279, 282, 288, 426, 429, 435, 447, or 483 or a functional fragment thereof, and
[0174] h. An amino acid molecule encoded by a nucleic acid molecule of SEQ ID NO: 77, 78, 86, 87, 89, 90, 104, 105, 139, 172, 175, 178, 181, 184, 190, 193, 196, 199, 202, 205, 208, 211, 217, 220, 223, 226, 229, 232, 235, 238, 241, 247, 250, 253, 256, 259, 262, 271, 274, 280, 283, 289, 430, 448, 484, 140, 173, 176, 179, 182, 185, 191, 194, 197, 200, 203, 206, 209, 212, 218, 221, 224, 227, 230, 233, 236, 239, 242, 248, 251, 254, 257, 35 260, 263, 272, 275, 281, 284, 290, 428, 431, 437, 449, or 485, or a functional fragment thereof, and
[0175] i. An amino acid molecule encoded by a nucleic acid molecule having at least 50% identity to SEQ ID NO: 77, 78, 86, 87, 89, 90, 104, 105, 139, 172, 175, 178, 181, 184, 190, 193, 196, 199, 202, 205, 208, 211, 217, 220, 223, 226, 229, 232, 235, 238, 241, 247, 250, 253, 256, 259, 262, 271, 274, 280, 283, 289, 430, 448, 484, 140, 173, 176, 179, 182, 185, 191, 194, 197, 200, 203, 206, 209, 212, 218, 221, 224, 227, 230, 233, 236, 239, 242, 248, 251, 254, 257, 260, 263, 272, 275, 281, 284, 290, 428, 431, 437, 449, or 485 , or a functional fragment thereof, and
[0176] j. An amino acid molecule encoded by a nucleic acid molecule hybridizing under stringent conditions to a fragment of at least 250 bases complementary to SEQ ID NO: 77, 78, 86, 87, 89, 90, 104, 105, 139, 172, 175, 178, 181, 184, 190, 193, 196, 199, 202, 205, 208, 211, 217, 220, 223, 226, 229, 232, 235, 238, 241, 247, 250, 253, 256, 259, 262, 271, 274, 280, 283, 289, 430, 448, 484, 140, 173, 176, 179, 182, 185, 191, 194, 197, 200, 203, 206, 209, 212, 218, 221, 224, 227, 230, 233, 236, 239, 242, 248, 251, 254, 257, 260, 263, 272, 275, 281, 284, 290, 428, 431, 437, 449, or 485 , or a functional fragment thereof,
   wherein the amino acid molecule as defined in g., h., i. and j. is catalysing the reaction from isopentenylphosphate and/or dimethylallyl phosphate to isopentenyl pyrophosphate and/or dimethylallyl pyrophosphate in an aqueous medium.

[0177] In a preferred embodiment, kinase 1 comprises an amino acid sequence having at least 50%, 51%, 52%, 53%, 54%, 55%, 56%, 57%, 58%, 59%, 60%, 61%, 62%, 63%, 64%, 65%, 66%, 67%, 68%, 69%, 70%, 71%, 72%, 73%, 74%, 75%, 76%, 77%, 78%, 79%, 80%, 81%, 82%, 83%, 84%, 85%, 86%, 87%, 88%, 89%, 90%, 91%, 92%, 93%, 94%, 95%, 96%, 97%, 98%, 99%, or more sequence identity to SEQ ID NO: 37, or a functional variant thereof, and

kinase 2 comprises an amino acid sequence having at least 50%, 51%, 52%, 53%, 54%, 55%, 56%, 57%, 58%, 59%, 60%, 61%, 62%, 63%, 64%, 65%, 66%, 67%, 68%, 69%, 70%, 71%, 72%, 73%, 74%, 75%, 76%, 77%, 78%, 79%, 80%, 81%, 82%, 83%, 84%, 85%, 86%, 87%, 88%, 89%, 90%, 91%, 92%, 93%, 94%, 95%, 96%, 97%, 98%, 99%, or more sequence identity to SEQ ID NO: 85, or a functional variant thereof

[0178] In another preferred embodiment, kinase 1 comprises an amino acid sequence having at least 50%, 51%, 52%, 53%, 54%, 55%, 56%, 57%, 58%, 59%, 60%, 61%, 62%, 63%, 64%, 65%, 66%, 67%, 68%, 69%, 70%, 71%, 72%, 73%, 74%, 75%, 76%, 77%, 78%, 79%, 80%, 81%, 82%, 83%, 84%, 85%, 86%, 87%, 88%, 89%, 90%, 91%, 92%, 93%, 94%, 95%, 96%, 97%, 98%, 99%, or more sequence identity to SEQ ID NO: 1, or a functional variant thereof, and

kinase 2 comprises an amino acid sequence having at least 50%, 51%, 52%, 53%, 54%, 55%, 56%, 57%, 58%, 59%, 60%, 61%, 62%, 63%, 64%, 65%, 66%, 67%, 68%, 69%, 70%, 71%, 72%, 73%, 74%, 75%, 76%, 77%, 78%, 79%, 80%, 81%, 82%, 83%, 84%, 85%, 86%, 87%, 88%, 89%, 90%, 91%, 92%, 93%, 94%, 95%, 96%, 97%, 98%, 99%, or more sequence identity to SEQ ID NO: 486, or a functional variant thereof

[0179] In another preferred embodiment, kinase 1 comprises an amino acid sequence having at least 50%, 51%, 52%, 53%, 54%, 55%, 56%, 57%, 58%, 59%, 60%, 61%, 62%, 63%, 64%, 65%, 66%, 67%, 68%, 69%, 70%, 71%, 72%, 73%, 74%, 75%, 76%, 77%, 78%, 79%, 80%, 81%, 82%, 83%, 84%, 85%, 86%, 87%, 88%, 89%, 90%, 91%, 92%, 93%, 94%, 95%, 96%, 97%, 98%, 99%, or more sequence identity to SEQ ID NO: 291, or a functional variant thereof, and

kinase 2 comprises an amino acid sequence having at least 50%, 51%, 52%, 53%, 54%, 55%, 56%, 57%, 58%, 59%, 60%, 61%, 62%, 63%, 64%, 65%, 66%, 67%, 68%, 69%, 70%, 71%, 72%, 73%, 74%, 75%, 76%, 77%, 78%, 79%, 80%, 81%, 82%, 83%, 84%, 85%, 86%, 87%, 88%, 89%, 90%, 91%, 92%, 93%, 94%, 95%, 96%, 97%, 98%, 99%, or more sequence identity to SEQ ID NO: 103, or a functional variant thereof

[0180] In another preferred embodiment, kinase 1 comprises an amino acid sequence having at least 50%, 51%, 52%, 53%, 54%, 55%, 56%, 57%, 58%, 59%, 60%, 61%, 62%, 63%, 64%, 65%, 66%, 67%, 68%, 69%, 70%, 71%, 72%, 73%, 74%, 75%, 76%, 77%, 78%, 79%, 80%, 81%, 82%, 83%, 84%, 85%, 86%, 87%, 88%, 89%, 90%, 91%, 92%, 93%, 94%, 95%, 96%, 97%, 20 98%, 99%, or more sequence identity to SEQ ID NO: 46, or a functional variant thereof, and

kinase 2 comprises an amino acid sequence having at least 50%, 51%, 52%, 53%, 54%, 55%, 56%, 57%, 58%, 59%, 60%, 61%, 62%, 63%, 64%, 65%, 66%, 67%, 68%, 69%, 70%, 71%, 72%, 73%, 74%, 75%, 76%, 77%, 78%, 79%, 80%, 81%, 82%, 83%, 84%, 85%, 86%, 87%, 88%, 89%, 90%, 91%, 92%, 93%, 94%, 95%, 96%, 97%, 98%, 99%, or more sequence identity to SEQ ID NO: 88, or a functional variant thereof

[0181] In another preferred embodiment, kinase 1 comprises an amino acid sequence having at least 50%, 51%, 52%, 53%, 54%, 55%, 56%, 57%, 58%, 59%, 60%, 61%, 62%, 63%, 64%, 65%, 66%, 67%, 68%, 69%, 70%, 71%, 72%, 73%, 74%, 75%, 76%, 77%, 78%, 79%, 80%, 81%, 82%, 83%, 84%, 85%, 86%, 87%, 88%, 89%, 90%, 91%, 92%, 93%, 94%, 95%, 96%, 97%, 98%, 99%, or more sequence identity to SEQ ID NO: 49, or a functional variant thereof, and

kinase 2 comprises an amino acid sequence having at least 50%, 51%, 52%, 53%, 54%, 55%, 35 56%, 57%, 58%, 59%, 60%, 61%, 62%, 63%, 64%, 65%, 66%, 67%, 68%, 69%, 70%, 71%, 72%, 73%, 74%, 75%, 76%, 77%, 78%, 79%, 80%, 81%, 82%, 83%, 84%, 85%, 86%, 87%, 88%, 89%, 90%, 91%, 92%, 93%, 94%, 95%, 96%, 97%, 98%, 99%, or more sequence identity to SEQ ID NO: 88, or a functional variant thereof

[0182] Another embodiment of the invention is a recombinant microorganism comprising an introduced, increased or enhanced activity and/or expression of one or more kinase 1, one or more kinase 2 and optionally one or more pathways capable of producing one or more isoprenoids preferably nerolidol, farnesol or farnesene,
[0183] wherein the one or more kinase 1 is capable of catalysing the reaction from prenol and/or isoprenol to isopentenylphosphate and/or dimethylallyl phosphate, and
[0184] wherein the one or more kinase 2 is capable of catalysing the reaction from isopentenylphosphate and/or dimethylallyl phosphate to isopentenyl pyrophosphate and/or dimethylallyl pyrophosphate, and
[0185] wherein the kinase 1 is comprising a sequence selected from the group consisting of
[0186] a. The amino acid molecule of SEQ ID NO: 43, 46, 49, 52, 123, 126, 135, 138, 144, 150, 153, 324, 351, 357, 375, 378, 390, or 393 and
[0187] b. An amino acid molecule having at least 50% identity to the amino acid molecule of SEQ ID NO: 43, 46, 49, 52, 123, 126, 135, 138, 144, 150, 153, 324, 351, 357, 375, 378, 390, or 393, or a functional fragment thereof, and
[0188] c. An amino acid molecule encoded by a nucleic acid molecule of SEQ ID NO: 44, 45, 47, 48, 50, 51, 53, 54, 124, 127, 136, 139, 145, 151, 154, 325, 358, 379, 394, 125, 128, 137, 140, 146, 152, 155, 326, 353, 359, 377, 380, 392, or 395 or a functional fragment thereof, and
[0189] d. An amino acid molecule encoded by a nucleic acid molecule having at least 50% identity to SEQ ID NO: 44, 45, 47, 48, 50, 51, 53, 54, 124, 127, 136, 139, 145, 151, 154, 325, 358, 379, 394, 125, 128, 137, 140, 146, 152, 155, 326, 353, 359, 377, 380, 392, or 395 or a functional fragment thereof, and
[0190] e. An amino acid molecule encoded by a nucleic acid molecule hybridizing under stringent conditions to a fragment of at least 250 bases complementary to SEQ ID NO: 44, 45, 47, 48, 50, 51, 53, 54, 124, 127, 136, 139, 145, 151, 154, 325, 358, 379, 394, 125, 128, 137, 140, 146, 152, 155, 326, 353, 359, 377, 380, 392, or 395 or a functional fragment thereof, and
   wherein the amino acid molecule as defined in b., c., d. and e. is catalysing the reaction from isoprenol and/or prenol to isopentenylphosphate and/or dimethylallyl.

[0191] In one embodiment of the invention, the amino acid molecule as defined in b., c., d. and e comprises at a position corresponding to the respective position in SEQ ID NO: 37 no 14A, no 122A, no 174M and/or no 217T. Preferably the kinase 1 of the invention comprises at a position corresponding to the respective position in SEQ ID NO: 37 at least 3, preferably at least 4 of 14Y, K or T, 122S or T, 174K or V and/or 217E or M.

[0192] In a further embodiment of the invention, the amino acid molecule as defined in b., c., d. and e comprises at a position corresponding to the respective position in SEQ ID NO: 37 no 30D, E, S or Y, no 33G or S, no 125S or T and/or no 201A, I or S. Preferably the kinase 1 of the invention comprises at a position corresponding to the respective position in SEQ ID NO: 37 at least 2, preferably at least 3, preferably at least 4 of 30N, 33T, 125 K, and/or 201 C or D.

[0193] In a further embodiment of the recombinant microorganism comprising an introduced, increased or enhanced activity and/or expression of one or more kinase 1, one or more kinase 2 and optionally one or more pathways capable of producing one or more isoprenoids preferably nerolidol, farnesol or farnesene the kinase 2 is comprising a sequence selected from the group consisting of
[0194] f. The amino acid molecule of SEQ ID NO: 76, 85, 88, 103, 138, 171, 174, 177, 180, 183, 189, 192, 195, 198, 201, 204, 207, 210, 216, 219, 222, 225, 228, 231, 234, 237, 240, 246, 249, 252, 255, 258, 261, 270, 273, 279, 282, 288, 426, 429, 435, 447, or 483, and
[0195] g. An amino acid molecule having at least 50% identity to the amino acid molecule of SEQ ID NO: 76, 85, 88, 103, 138, 171, 174, 177, 180, 183, 189, 192, 195, 198, 201, 204, 15 207, 210, 216, 219, 222, 225, 228, 231, 234, 237, 240, 246, 249, 252, 255, 258, 261, 270, 273, 279, 282, 288, 426, 429, 435, 447, or 483 or a functional fragment thereof, and
[0196] h. An amino acid molecule encoded by a nucleic acid molecule of SEQ ID NO: 77, 78, 86, 87, 89, 90, 104, 105, 139, 172, 175, 178, 181, 184, 190, 193, 196, 199, 202, 205, 208, 20 211, 217, 220, 223, 226, 229, 232, 235, 238, 241, 247, 250, 253, 256, 259, 262, 271, 274, 280, 283, 289, 430, 448, 484, 140, 173, 176, 179, 182, 185, 191, 194, 197, 200, 203, 206, 209, 212, 218, 221, 224, 227, 230, 233, 236, 239, 242, 248, 251, 254, 257, 260, 263, 272, 275, 281, 284, 290, 428, 431, 437, 449, or 485 , or a functional fragment thereof, and
[0197] i. An amino acid molecule encoded by a nucleic acid molecule having at least 50% identity to SEQ ID NO: 77, 78, 86, 87, 89, 90, 104, 105, 139, 172, 175, 178, 181, 184, 190, 193, 196, 199, 202, 205, 208, 211, 217, 220, 223, 226, 229, 232, 235, 238, 241, 247, 250, 253, 256, 259, 262, 271, 274, 280, 283, 289, 430, 448, 484, 140, 173, 176, 179, 182, 185, 191, 194, 197, 200, 203, 206, 209, 212, 218, 221, 224, 227, 230, 233, 236, 239, 30 242, 248, 251, 254, 257, 260, 263, 272, 275, 281, 284, 290, 428, 431, 437, 449, or 485 , or a functional fragment thereof, and
[0198] j. An amino acid molecule encoded by a nucleic acid molecule hybridizing under stringent conditions to a fragment of at least 250 bases complementary to SEQ ID NO: 77, 78, 86, 87, 89, 90, 104, 105, 139, 172, 175, 178, 181, 184, 190, 193, 196, 199, 202, 205, 208, 35 211, 217, 220, 223, 226, 229, 232, 235, 238, 241, 247, 250, 253, 256, 259, 262, 271, 274, 280, 283, 289, 430, 448, 484, 140, 173, 176, 179, 182, 185, 191, 194, 197, 200, 203, 206, 209, 212, 218, 221, 224, 227, 230, 233, 236, 239, 242, 248, 251, 254, 257, 260, 263, 272, 275, 281, 284, 290, 428, 431, 437, 449, or 485 , or a functional fragment thereof, and
   wherein the amino acid molecule as defined in g., h., i. and j. is catalysing the reaction from isopentenylphosphate and/or dimethylallyl phosphate to isopentenyl pyrophosphate and/or dimethylallyl pyrophosphate.

[0199] Another embodiment of the invention is a method for fermentative production of one or more isoprenoid preferably nerolidol, farnesol or farnesene or isopentenyl pyrophosphate and/or dimethylallyl pyrophosphate or salt thereof comprising the steps of
[0200] i. Providing a recombinant microorganism comprising an introduced, increased or enhanced activity and/or expression of one or more kinase 1, one or more kinase 2 and optionally one or more pathways capable of producing one or more isoprenoids,
[0201] ii. Culturing said microorganism in a medium comprising prenol and/or isoprenol under conditions that allow for the production of said one or more isoprenoid or salt thereof or isopentenyl pyrophosphate and/or dimethylallyl pyrophosphate or salt thereof and optionally isolating said one or more isoprenoid or salt thereof or isopentenyl pyrophosphate and/or dimethylallyl pyrophosphate or salt thereof from the medium.

[0202] A further embodiment of the invention is a composition comprising one or more recombinant microorganisms comprising an introduced, increased or enhanced activity and/or expression of one or more kinase 1, one or more kinase 2 and optionally one or more pathways capable of producing one or more isoprenoids. In one embodiment, said composition is further comprising prenol and/or isoprenol, a medium and a carbon source.

[0203] A further embodiment of the invention is a method for producing a recombinant microorganism comprising an introduced, increased or enhanced activity and/or expression of one or more kinase 1, one or more kinase 2 and optionally one or more pathways capable of producing one or more isoprenoids preferably nerolidol, farnesol or farnesene comprising the steps of:
[0204] (I) introducing, increasing or enhancing the activity and/or expression of a kinase 1 gene encoding a kinase 1 enzyme having a prenol and/or isoprenol phosphorylating activity in said microorganism; and
[0205] (II) introducing, increasing or enhancing the activity and/or expression of a kinase 2 gene encoding a kinase 2 enzyme having an isopentenylphosphate and/or dimethylallyl phosphate phosphorylating activity in said microorganism; and optionally
[0206] (III) further introducing, increasing or enhancing the activity and/or expression of an isoprenoid producing pathway in said microorganism.

[0207] The recombinant microorganism produced according to the method as defined above or used in the method for fermentative production of one or more isoprenoid or salt thereof or isopentenyl pyrophosphate and/or dimethylallyl pyrophosphate or salt thereof is preferably selected from the list comprising Gluconobacter oxydans, Gluconobacter asaii, Achromobacter delmarvae, Achromobacter viscosus, Achromobacter lacticum, Agrobacterium tumefaciens, Agrobacterium radiobacter, Alcaligenes faecalis, Arthrobacter citreus, Arthrobacter tumescens, Arthrobacter paraffineus, Arthrobacter hydrocarboglutamicus, Arthrobacter oxydans, Aureobacterium saperdae, Azotobacter indicus, Brevibacterium ammoniagenes, Brevibacterium divaricatum, Brevibacterium lactofermentum, Brevibacterium flavum, Brevibacterium globosum, Brevibacterium fuscum, Brevibacterium ketoglutamicum, Brevibacterium helcolum, Brevibacterium pusillum, Brevibacterium testaceum, Brevibacterium roseum, Brevibacterium immariophilium, Brevibacterium linens, Brevibacterium protopharmiae, Corynebacterium acetophilum, Corynebacterium glutamicum, Corynebacterium callunae, Corynebacterium acetoacidophilum, Corynebacterium acetoglutamicum, Enterobacter aerogenes, Erwinia amylovora, Erwinia carotovora, Erwinia herbicola, Erwinia chrysanthemi, Flavobacterium peregrinum, Flavobacterium fucatum, Flavobacterium aurantinum, Flavobacterium rhenanum, Flavobacterium sewanense, Flavobacterium breve, Flavobacterium meningosepticum, Micrococcus sp. CCM825, Morganella morganii, Nocardia opaca, Nocardia rugosa, Planococcus eucinatus, Proteus rettgeri, Propionibacterium shermanii, Pseudomonas synxantha, Pseudomonas azotoformans, Pseudomonas jluorescens, Pseudomonas ovalis, Pseudomonas stutzeri, Pseudomonas acidovolans, Pseudomonas mucidolens, Pseudomonas testosteroni, Pseudomonas aeruginosa, Rhodococcus erythropolis, Rhodococcus rhodochrous, Rhodococcus sp. ATCC 15592, Rhodococcus sp. ATCC 19070, Sporosarcina ureae, Staphylococcus aureus, Vibrio metschnikovii, Vibrio tyrogenes, Actinomadura madurae, Actinomyces violaceochromogenes, Kitasatosporia parulosa, Streptomyces avermitilis, Streptomyces coelicolor, Streptomyces flavelus, Streptomyces griseolus, Streptomyces lividans, Streptomyces olivaceus, Streptomyces tanashiensis, Streptomyces virginiae, Streptomyces antibioticus, Streptomyces cacaoi, Streptomyces lavendulae, Streptomyces viridochromogenes, Aeromonas salmonicida, Bacillus pumilus, Bacillus circulans, Bacillus thiaminolyticus, Escherichia freundii, Microbacterium ammoniaphilum, Serratia marcescens, Salmonella typhimurium, Salmonella schottmulleri, Xanthomonas citri, Synechocystis sp., Synechococcus elongatus, Thermosynechococcus elongatus, Microcystis aeruginosa, Nostoc sp., N. commune, N.sphaericum, Nostoc punctiforme, Spirulina platensis, Lyngbya majuscule, L. lagerheimii, Phormidium tenue, Anabaena sp., Leptolyngbya sp., Saccharomyces spec, such as Saccharomyces cerevisiae, Hansenula spec, such as Hansenula polymorpha, Schizosaccharomyces spec, such asSchizosaccharomyces pombe, Kluyveromyces spec, such as Kluyveromyces lactis and Kluyveromyces marxianus, Yarrowia spec, such as Yarrowia lipolytica, Pichia spec, such as Pichia methanolica, Pichia stipites and Pichia pastoris, Zygosaccharomyces spec, such as Zygosaccharomyces rouxii and Zygosaccharomyces bailii, Candida spec, such as Candida boidinii, Candida utilis, Candida freyschussii, Candida glabrata and Candida sonorensis, Schwanniomyces spec, such as Schwanniomyces occidentalis, Arxula spec, such as Arxula adeninivorans, Ogataea spec such as Ogataea minuta, Klebsiella spec, such as Klebsiella pneumonia, Aspergillus spec. such as Aspergillus niger or Myceliophthora thermophila.

[0208] More preferably the recombinant microorganism is Rhodococcus rhodochrous, Aerococcus sp., Aspergillus sp., Bacillus pumilus, Bacillus subtilis, Bacteroides thetaiotaomicron, Clostridium algidicarnis, Corynebacterium efficiens, Corynebacterium glutamicum, Escherichia coli, Haloferax volcanii, Lactobacillus casei, Methanocaldococcus jannaschii, Methanothermobacter thermautotrophicus, Myceliophthora thermophila, Pichia pastoris, Pseudomonas synxantha, Pseudomonas azotoformans, Pseudomonas jluorescens, Pseudomonas ovalis, Pseudomonas stutzeri, Pseudomonas acidovolans, Pseudomonas mucidolens, Pseudomonas testosteroni, Pseudomonas aeruginosa, Pseudozyma tsukubaensis, Ralstonia eutropha, Rhodobacter sphaeroides, Rhodococcus opacus, Saccharomyces cerevisiae, Shigella boydii, Sinorhizobium meliloti, Streptomyces antibioticus, Streptomyces avermitilis, Streptomyces cacaoi, Streptomyces coelicolor, Streptomyces flavelus, Streptomyces griseolus, Streptomyces lavendulae, Streptomyces lividans, Streptomyces olivaceus, Streptomyces tanashiensis, Streptomyces virginiae, Streptomyces viridochromogenes, Thermoplasma acidophilum, Vibrio natrigens or Yarrowia lipolytica.

[0209] Especially preferred recombinant microorganisms are Bacillus subtilis, Corynebacterium glutamicum, Escherichia coli, Pseudomonas aeruginosa, Pseudomonas putida, Rhodobacter sphaeroides, Rhodococcus opacus, Saccharomyces cerevisiae and Yarrowia lipolytica.

[0210] A further embodiment of the invention is a recombinant expression construct comprising
[0211] i. a promoter functional in a microorganism functionally linked to a nucleic acid molecule encoding a kinase 1 and
[0212] ii. a promoter functional in a microorganism functionally linked to a nucleic acid molecule encoding kinase 2,
   [0213] wherein at least one of the promoters functionally linked to the kinase 1 or kinase 2 is heterologous to the kinase 1 or kinase 2,
   [0214] wherein the kinase 1 is comprising a sequence encoding an amino acid molecule selected from the group consisting of
[0215] a. The amino acid molecule of SEQ ID NO: 43, 46, 49, 52, 123, 126, 135, 138, 144, 150, 153, 324, 351, 357, 375, 378, 390, or 393 and
[0216] b. An amino acid molecule having at least 50% identity to the amino acid molecule of SEQ ID NO: 43, 46, 49, 52, 123, 126, 135, 138, 144, 150, 153, 324, 351, 357, 375, 378, 390, or 393 or a functional fragment thereof, and
[0217] c. An amino acid molecule encoded by a nucleic acid molecule of SEQ ID NO: 44, 45, 47, 48, 50, 51, 53, 54, 124, 127, 136, 139, 145, 151, 154, 325, 358, 379, 394, 125, 128, 137, 140, 146, 152, 155, 326, 353, 359, 377, 380, 392, or 395 or a functional fragment thereof, and
[0218] d. An amino acid molecule encoded by a nucleic acid molecule having at least 50% identity to SEQ ID NO: 44, 45, 47, 48, 50, 51, 53, 54, 124, 127, 136, 139, 145, 151, 154, 325, 358, 379, 394, 125, 128, 137, 140, 146, 152, 155, 326, 353, 359, 377, 380, 392, or 395 or a functional fragment thereof, and
[0219] e. An amino acid molecule encoded by a nucleic acid molecule hybridizing under stringent conditions to a fragment of at least 250 bases complementary to SEQ ID NO: 44, 45, 47, 48, 50, 51, 53, 54, 124, 127, 136, 139, 145, 151, 154, 325, 358, 379, 394, 125, 128, 137, 10 140, 146, 152, 155, 326, 353, 359, 377, 380, 392, or 395 or a functional fragment thereof, and
   wherein the amino acid molecule as defined in b., c., d. and e. is catalysing the reaction from isoprenol and/or prenol to isopentenylphosphate and/or dimethylallyl.

[0220] In one embodiment of the invention, the amino acid molecule as defined in b., c., d. and e comprises at a position corresponding to the respective position in SEQ ID NO: 37 no 14A, no 122A, no 174M and/or no 217T. Preferably the kinase 1 of the invention comprises at a position corresponding to the respective position in SEQ ID NO: 37 at least 3, preferably at least 4 of 14Y, K or T, 122S or T, 174K or V and/or 217E or M. In a further embodiment of the invention, the amino acid molecule as defined in b., c., d. and e comprises at a position corresponding to the respective position in SEQ ID NO: 37 no 30D, E, S or Y, no 33G or S, no 125S or T and/or no 201A, I or S. Preferably the kinase 1 of the invention comprises at a position corresponding to the respective position in SEQ ID NO: 37 at least 2, preferably at least 3, preferably at least 4 of 30N, 33T, 125 K, and/or 201 C or D.

[0221] In one embodiment of the recombinant expression construct comprising
[0222] i. a promoter functional in a microorganism functionally linked to a nucleic acid molecule encoding a kinase 1 and
[0223] ii. a promoter functional in a microorganism functionally linked to a nucleic acid molecule encoding kinase 2,
   wherein at least one of the promoters functionally linked to the kinase 1 or kinase 2 is heterologous to the kinase 1 or kinase 2, the kinase 2 is comprising a sequence selected from the group consisting of
[0224] f. The amino acid molecule of SEQ ID NO: 76, 85, 88, 103, 138, 171, 174, 177, 180, 183, 189, 192, 195, 198, 201, 204, 207, 210, 216, 219, 222, 225, 228, 231, 234, 237, 240, 246, 249, 252, 255, 258, 261, 270, 273, 279, 282, 288, 426, 429, 435, 447, or 483, and
[0225] g. An amino acid molecule having at least 50% identity to the amino acid molecule of SEQ ID NO: 76, 85, 88, 103, 138, 171, 174, 177, 180, 183, 189, 192, 195, 198, 201, 204, 207, 210, 216, 219, 222, 225, 228, 231, 234, 237, 240, 246, 249, 252, 255, 258, 261, 270, 273, 279, 282, 288, 426, 429, 435, 447, or 483 or a functional fragment thereof, and
[0226] h. An amino acid molecule encoded by a nucleic acid molecule of SEQ ID NO: 77, 78, 86, 87, 89, 90, 104, 105, 139, 172, 175, 178, 181, 184, 190, 193, 196, 199, 202, 205, 208, 211, 217, 220, 223, 226, 229, 232, 235, 238, 241, 247, 250, 253, 256, 259, 262, 271, 274, 280, 283, 289, 430, 448, 484, 140, 173, 176, 179, 182, 185, 191, 194, 197, 200, 203, 206, 209, 212, 218, 221, 224, 227, 230, 233, 236, 239, 242, 248, 251, 254, 257, 260, 263, 272, 275, 281, 284, 290, 428, 431, 437, 449, or 485, or a functional fragment thereof, and
[0227] i. An amino acid molecule encoded by a nucleic acid molecule having at least 50% identity to SEQ ID NO: 77, 78, 86, 87, 89, 90, 104, 105, 139, 172, 175, 178, 181, 184, 190, 193, 196, 199, 202, 205, 208, 211, 217, 220, 223, 226, 229, 232, 235, 238, 241, 247, 250, 253, 256, 259, 262, 271, 274, 280, 283, 289, 430, 448, 484, 140, 173, 176, 179, 182, 185, 191, 194, 197, 200, 203, 206, 209, 212, 218, 221, 224, 227, 230, 233, 236, 239, 242, 248, 251, 254, 257, 260, 263, 272, 275, 281, 284, 290, 428, 431, 437, 449, or 485, or a functional fragment thereof, and
[0228] j. An amino acid molecule encoded by a nucleic acid molecule hybridizing under stringent conditions to a fragment of at least 250 bases complementary to SEQ ID NO: 77, 78, 86, 87, 89, 90, 104, 105, 139, 172, 175, 178, 181, 184, 190, 193, 196, 199, 202, 205, 208, 211, 217, 220, 223, 226, 229, 232, 235, 238, 241, 247, 250, 253, 256, 259, 262, 271, 274, 280, 283, 289, 430, 448, 484, 140, 173, 176, 179, 182, 185, 191, 194, 197, 200, 203, 206, 209, 212, 218, 221, 224, 227, 230, 233, 236, 239, 242, 248, 251, 254, 257, 260, 263, 272, 275, 281, 284, 290, 428, 431, 437, 449, or 485, or a functional fragment thereof, and
   [0229] wherein the amino acid molecule as defined in g., h., i. and j. is catalysing the reaction from isopentenylphosphate and/or dimethylallyl phosphate to isopentenyl pyrophosphate and/or dimethylallyl pyrophosphate.

[0230] In a preferred embodiment, kinase 1 comprises an amino acid sequence having at least 50%, 51%, 52%, 53%, 54%, 55%, 56%, 57%, 58%, 59%, 60%, 61%, 62%, 63%, 64%, 65%, 66%, 67%, 68%, 69%, 70%, 71%, 72%, 73%, 74%, 75%, 76%, 77%, 78%, 79%, 80%, 81%, 82%, 83%, 84%, 85%, 86%, 87%, 88%, 89%, 90%, 91%, 92%, 93%, 94%, 95%, 96%, 97%, 98%, 99%, or more sequence identity to SEQ ID NO: 37, or a functional variant thereof, and

kinase 2 comprises an amino acid sequence having at least 50%, 51%, 52%, 53%, 54%, 55%, 56%, 57%, 58%, 59%, 60%, 61%, 62%, 63%, 64%, 65%, 66%, 67%, 68%, 69%, 70%, 71%, 72%, 73%, 74%, 75%, 76%, 77%, 78%, 79%, 80%, 81%, 82%, 83%, 84%, 85%, 86%, 87%, 88%, 89%, 90%, 91%, 92%, 93%, 94%, 95%, 96%, 97%, 98%, 99%, or more sequence identity to SEQ ID NO: 85, or a functional variant thereof

[0231] In another preferred embodiment, kinase 1 comprises an amino acid sequence having at least 50%, 51%, 52%, 53%, 54%, 55%, 56%, 57%, 58%, 59%, 60%, 61%, 62%, 63%, 64%, 65%, 66%, 67%, 68%, 69%, 70%, 71%, 72%, 73%, 74%, 75%, 76%, 77%, 78%, 79%, 80%, 81%, 82%, 83%, 84%, 85%, 86%, 87%, 88%, 89%, 90%, 91%, 92%, 93%, 94%, 95%, 96%, 97%, 98%, 99%, or more sequence identity to SEQ ID NO: 1, or a functional variant thereof, and

kinase 2 comprises an amino acid sequence having at least 50%, 51%, 52%, 53%, 54%, 55%, 56%, 57%, 58%, 59%, 60%, 61%, 62%, 63%, 64%, 65%, 66%, 67%, 68%, 69%, 70%, 71%, 72%, 73%, 74%, 75%, 76%, 77%, 78%, 79%, 80%, 81%, 82%, 83%, 84%, 85%, 86%, 87%, 88%, 89%, 90%, 91%, 92%, 93%, 94%, 95%, 96%, 97%, 98%, 99%, or more sequence identity to SEQ ID NO: 486, or a functional variant thereof

[0232] In another preferred embodiment, kinase 1 comprises an amino acid sequence having at least 50%, 51%, 52%, 53%, 54%, 55%, 56%, 57%, 58%, 59%, 60%, 61%, 62%, 63%, 64%, 65%, 66%, 67%, 68%, 69%, 70%, 71%, 72%, 73%, 74%, 75%, 76%, 77%, 78%, 79%, 80%, 81%, 82%, 83%, 84%, 85%, 86%, 87%, 88%, 89%, 90%, 91%, 92%, 93%, 94%, 95%, 96%, 97%, 98%, 99%, or more sequence identity to SEQ ID NO: 291, or a functional variant thereof, and

kinase 2 comprises an amino acid sequence having at least 50%, 51%, 52%, 53%, 54%, 55%, 56%, 57%, 58%, 59%, 60%, 61%, 62%, 63%, 64%, 65%, 66%, 67%, 68%, 69%, 70%, 71%, 72%, 73%, 74%, 75%, 76%, 77%, 78%, 79%, 80%, 81%, 82%, 83%, 84%, 85%, 86%, 87%, 88%, 89%, 90%, 91%, 92%, 93%, 94%, 95%, 96%, 97%, 98%, 99%, or more sequence identity to SEQ ID NO: 103, or a functional variant thereof

[0233] In another preferred embodiment, kinase 1 comprises an amino acid sequence having at least 50%, 51%, 52%, 53%, 54%, 55%, 56%, 57%, 58%, 59%, 60%, 61%, 62%, 63%, 64%, 65%, 66%, 67%, 68%, 69%, 70%, 71%, 72%, 73%, 74%, 75%, 76%, 77%, 78%, 79%, 80%, 81%, 82%, 83%, 84%, 85%, 86%, 87%, 88%, 89%, 90%, 91%, 92%, 93%,94%, 95%, 96%, 97% 98%, 99%, or more sequence identity to SEQ ID NO: 46, or a functional variant thereof, and

kinase 2 comprises an amino acid sequence having at least 50%, 51%, 52%, 53%, 54%, 55%, 56%, 57%, 58%, 59%, 60%, 61%, 62%, 63%, 64%, 65%, 66%, 67%, 68%, 69%, 70%, 71%, 72%, 73%, 74%, 75%, 76%, 77%, 78%, 79%, 80%, 81%7 82%, 83%, 84%, 85%, 86%, 87%, 88%, 89%, 90%, 91%7 92%, 93%, 94%, 95%, 96%, 97%, 98%, 99%, or more sequence identity to SEQ ID NO: 88, or a functional variant thereof

[0234] In another preferred embodiment, kinase 1 comprises an amino acid sequence having at least 50%, 51%, 52%, 53%, 54%, 55%, 56%, 57%, 58%, 59%, 60%, 61%, 62%, 63%, 64%, 65%, 66%, 67%, 68%, 69%, 70%, 71%, 72%, 73%, 74%, 75%, 76%, 77%, 78%, 79%, 80%, 81%, 82%, 83%, 84%, 85%, 86%, 87%, 88%, 89%, 90%, 91%, 92%, 93%, 94%, 95%, 96%, 97%, 98%, 99%, or more sequence identity to SEQ ID NO: 49, or a functional variant thereof, and

kinase 2 comprises an amino acid sequence having at least 50%, 51%, 52%, 53%, 54%, 55%, 56%, 57%, 58%, 59%, 60%, 61%, 62%, 63%, 64%, 65%, 66%, 67%, 68%, 69%, 70%, 71%, 72%, 73%, 74%, 75%, 76%, 77%, 78%, 79%, 80%, 81%, 82%, 83%, 84%, 85%, 86%, 87%, 88%, 89%, 90%, 91%, 92%, 93%, 94%, 95%, 96%, 97%, 98%, 99%, or more sequence identity to SEQ ID NO: 88, or a functional variant thereof

[0235] The kinase 1 and kinase 2 may each be under control of a heterologous promoter or may be arranged in an operon under control of one promoter heterologous to the kinase 1, kinase 2 or both. The operon may comprise further genes necessary for the production of a preferred isoprenoid from IPP and/or DMAPP.

[0236] Amino acid molecules having a certain identity to any of the sequences of SEQ ID NO 1, 4, 7, 10, 13, 16, 19, 22, 25, 28, 31, 34, 37, 40, 43, 46, 49, 52, 55, 58, 61, 64, 67, 70, 73, 76, 79, 82, 85, 88, 91, 94, 97, 100, 103, 106, 111, 114, 117, 120, 123, 126, 129, 132, 135, 138, 141, 144, 147, 150, 153, 156, 159, 162, 165, 168, 171, 174, 177, 180, 183, 186, 189, 192, 195, 198, 201, 204, 207, 210, 213, 216, 219, 222, 225, 228, 231, 234, 237, 240, 243, 246, 249, 252, 255, 258, 261, 264, 267, 270, 273, 276, 279, 282, 285, 288, 291, 294, 297, 300, 303, 306, 309, 312, 315, 318, 321, 324, 327, 330, 333, 336, 339, 342, 345, 348, 351, 354, 357, 360, 363, 366, 369, 372, 375, 378, 381, 384, 387, 390, 393, 396, 399, 402, 405, 408, 411, 414, 417, 420, 423, 426, 429, 432, 435, 438, 441, 444, 447, 450, 453, 456, 459, 462, 465, 468, 471, 474, 477, 480, 483, or 486 include amino acid molecules having at least 50%, 51%, 52%, 53%, 54%, 55%, 56%, 57%, 58%, 59%, 60%, 61%, 62%, 63%, 64%, 65%, 66%, 67%, 68%, 69%, 70%, 71%, 72%, 73%, 74%, 75%, 76%, 77%, 78%, 79%, 80%, 81%, 82%, 83%, 84%, 85%, 86%, 87%, 88%, 89%, 90%, 91%, 92%, 93%, 94%, 95%, 96%, 97%, 98%, 99%, or more sequence identity to any of SEQ ID NO: 1, 4, 7, 10, 13, 16, 19, 22, 25, 28, 31, 34, 37, 40, 43, 46, 49, 52, 55, 58, 61, 64, 67, 70, 73, 76, 79, 82, 85, 88, 91, 94, 97, 100, 103, 106, 111, 114, 117, 120, 123, 126, 129, 132, 135, 138, 141, 144, 147, 150, 153, 156, 159, 162, 165, 168, 171, 174, 177, 180, 183, 186, 189, 192, 195, 198, 201, 204, 207, 210, 213, 216, 219, 222, 225, 228, 231, 234, 237, 240, 243, 246, 249, 252, 255, 258, 261, 264, 267, 270, 273, 276, 279, 282, 285, 288, 291, 294, 297, 300, 303, 306, 309, 312, 315, 318, 321, 324, 327, 330, 333, 336, 339, 342, 345, 348, 351, 354, 357, 360, 363, 366, 369, 372, 375, 378, 381, 384, 387, 390, 393, 396, 399, 402, 405, 408, 411, 414, 417, 420, 423, 426, 429, 432, 435, 438, 441, 444, 447, 450, 453, 456, 459, 462, 465, 468, 471, 474, 477, 480, 483, or 486.

[0237] Nucleic acid molecules having a certain identity to any of the sequences of SEQ ID NO 2, 3, 5, 6, 8, 9, 11, 12, 14, 15, 17, 18, 20, 21, 23, 24, 26, 27, 29, 30, 32, 33, 35, 36, 38, 39, 41, 42, 44, 45, 47, 48, 50, 51, 53, 54, 56, 57, 59, 60, 62, 63, 65, 66, 68, 69, 71, 72, 74, 75, 77, 78, 80, 81, 83, 84, 86, 87, 89, 90, 92, 93, 95, 96, 98, 99, 101, 102, 104, 105, 107, 108, 109, 110, 112, 115, 118, 121, 124, 127, 130, 133, 136, 139, 142, 145, 148, 151, 154, 157, 160, 163, 166, 169, 172, 175, 178, 181, 184, 187, 190, 193, 196, 199, 202, 205, 208, 211, 214, 217, 220, 223, 226, 229, 232, 235, 238, 241, 244, 247, 250, 253, 256, 259, 262, 265, 268, 271, 274, 277, 280, 283, 286, 289, 292, 295, 298, 301, 304, 307, 310, 313, 316, 319, 322, 325, 349, 358, 361, 367, 379, 388, 394, 397, 412, 430, 442, 445, 448, 463, 478, 481, 484, 487, 113, 116, 119, 122, 125, 128, 131, 134, 137, 140, 143, 146, 149, 152, 155, 158, 161, 164, 167, 170, 173, 176, 179, 182, 185, 188, 191, 194, 197, 200, 203, 206, 209, 212, 215, 218, 221, 224, 227, 230, 233, 236, 239, 242, 245, 248, 251, 254, 257, 260, 263, 266, 269, 272, 275, 278, 281, 284, 287, 290, 293, 296, 299, 302, 305, 308, 311, 314, 317, 320, 323, 326, 329, 332, 335, 338, 341, 344, 347, 350, 353, 356, 359, 362, 365, 368, 371, 374, 377, 380, 383, 386, 389, 392, 395, 398, 401, 404, 407, 410, 413, 416, 419, 422, 425, 428, 431, 434, 437, 440, 443, 446, 449, 452, 455, 458, 461, 464, 467, 470, 473, 476, 479, 482, 485, or 488 include nucleic acid molecules having at least 50%, 51%, 52%, 53%, 54%, 55%, 56%, 57%, 58%, 59%, 60%, 61%, 62%, 63%, 64%, 65%, 66%, 67%, 68%, 69%, 70%, 71%, 72%, 73%, 74%, 75%, 76%, 77%, 78%, 79%, 80%, 81%, 82%, 83%, 84%, 85%, 86%, 87%, 88%, 89%, 90%, 91%, 92%, 93%, 94%, 95%, 96%, 97%, 98%, 99%, or more sequence identity to any of SEQ ID NO: 2, 3, 5, 6, 8, 9, 11, 12, 14, 15, 17, 18, 20, 21, 23, 24, 26, 27, 29, 30, 32, 33, 35, 36, 38, 39, 41, 42, 44, 45, 47, 48, 50, 51, 53, 54, 56, 57, 59, 60, 62, 63, 65, 66, 68, 69, 71, 72, 74, 75, 77, 78, 80, 81, 83, 84, 86, 87, 89, 90, 92, 93, 95, 96, 98, 99, 101, 102, 104, 105, 107, 108, 109, 110, 112, 115, 118, 121, 124, 127, 130, 133, 136, 139, 142, 145, 148, 151, 154, 157, 160, 163, 166, 169, 172, 175, 178, 181, 184, 187, 190, 193, 196, 199, 202, 205, 208, 211, 214, 217, 220, 223, 226, 229, 232, 235, 238, 241, 244, 247, 250, 253, 256, 259, 262, 265, 268, 271, 274, 277, 280, 283, 286, 289, 292, 295, 298, 301, 304, 307, 310, 313, 316, 319, 322, 325, 349, 358, 361, 367, 379, 388, 394, 397, 412, 430, 442, 445, 448, 463, 478, 481, 484, 487, 113, 116, 119, 122, 125, 128, 131, 134, 137, 140, 143, 146, 149, 152, 155, 158, 161, 164, 167, 170, 173, 176, 179, 182, 185, 188, 191, 194, 197, 200, 203, 206, 209, 212, 215, 218, 221, 224, 227, 230, 233, 236, 239, 242, 245, 248, 251, 254, 257, 260, 263, 266, 269, 272, 275, 278, 281, 284, 287, 290, 293, 296, 299, 302, 305, 308, 311, 314, 317, 320, 323, 326, 329, 332, 335, 338, 341, 35 344, 347, 350, 353, 356, 359, 362, 365, 368, 371, 374, 377, 380, 383, 386, 389, 392, 395, 398, 401, 404, 407, 410, 413, 416, 419, 422, 425, 428, 431, 434, 437, 440, 443, 446, 449, 452, 455, 458, 461, 464, 467, 470, 473, 476, 479, 482, 485, or 488.

[0238] A functional fragment of an amino acid molecule of the invention comprises at least 50 consecutive amino acids, preferably at least 75 consecutive amino acids, more preferably at least 100 consecutive amino acids, more preferably at least 125 consecutive amino acids, more preferably at least 150 consecutive amino acids, even more preferably at least 175 consecutive amino acids, even more preferably at least 200 consecutive amino acids, even more preferably at least 225 consecutive amino acids, most preferably at least 250 consecutive amino acids of any of the sequences of SEQ ID NO: 1, 4, 7, 10, 13, 16, 19, 22, 25, 28, 31, 34, 37, 40, 43, 46, 49, 52, 55, 58, 61, 64, 67, 70, 73, 76, 79, 82, 85, 88, 91, 94, 97, 100, 103, 106, 111, 114, 117, 120, 123, 126, 129, 132, 135, 138, 141, 144, 147, 150, 153, 156, 159, 162, 165, 168, 171, 174, 177, 180, 183, 186, 189, 192, 195, 198, 201, 204, 207, 210, 213, 216, 219, 222, 225, 228, 231, 234, 237, 240, 243, 246, 249, 252, 255, 258, 261, 264, 267, 270, 273, 276, 279, 282, 285, 288, 291, 294, 297, 300, 303, 306, 309, 312, 315, 318, 321, 324, 327, 330, 333, 336, 339, 342, 345, 348, 351, 354, 357, 360, 363, 366, 369, 372, 375, 378, 381, 384, 387, 390, 393, 396, 399, 402, 405, 408, 411, 414, 417, 420, 423, 426, 429, 432, 435, 438, 441, 444, 447, 450, 453, 456, 459, 462, 465, 468, 471, 474, 477, 480, 483, or 486.

[0239] A further embodiment of the invention is a recombinant vector comprising the recombinant expression construct comprising
[0240] i. a promoter functional in a microorganism functionally linked to a nucleic acid molecule encoding a kinase 1 and
[0241] ii. a promoter functional in a microorganism functionally linked to a nucleic acid molecule encoding kinase 2,
   wherein at least one of the promoters functionally linked to the kinase 1 or kinase 2 is heterologous to the kinase 1 or kinase 2. The kinase 1 and kinase 2 may each be under control of a heterologous promoter or may be arranged in an operon under control of one promoter heterologous to the kinase 1, kinase 2 or both. The operon may comprise further genes necessary for the production of a preferred isoprenoid from IPP and/or DMAPP.

[0242] A further embodiment of the invention is a recombinant microorganism comprising a) the recombinant expression construct comprising a promoter functional in a microorganism functionally linked to a nucleic acid molecule encoding a kinase 1 and a promoter functional in a microorganism functionally linked to a nucleic acid molecule encoding kinase 2, wherein at least one of the promoters functionally linked to the kinase 1 or kinase 2 is heterologous to the kinase 1 or kinase 2 or b) the recombinant vector comprising said recombinant expression construct.

[0243] Preferably the recombinant microorganism is Rhodococcus rhodochrous, Aerococcus sp., Aspergillus sp., Bacillus pumilus, Bacillus subtilis, Bacteroides thetaiotaomicron, Clostridium algidicarnis, Corynebacterium efficiens, Corynebacterium glutamicum, Escherichia coli, Haloferax volcanii, Lactobacillus casei, Methanocaldococcus jannaschii, Methanothermobacter thermautotrophicus, Myceliophthora thermophila, Pichia pastoris, Pseudomonas synxantha, Pseudomonas azotoformans, Pseudomonas jluorescens, Pseudomonas ovalis, Pseudomonas stutzeri, Pseudomonas acidovolans, Pseudomonas mucidolens, Pseudomonas testosteroni, Pseudomonas aeruginosa, Pseudozyma tsukubaensis, Ralstonia eutropha, Rhodobacter sphaeroides, Rhodococcus opacus, Saccharomyces cerevisiae, Shigella boydii, Sinorhizobium meliloti, Streptomyces antibioticus, Streptomyces avermitilis, Streptomyces cacaoi, Streptomyces coelicolor, Streptomyces flavelus, Streptomyces griseolus, Streptomyces lavendulae, Streptomyces lividans, Streptomyces olivaceus, Streptomyces tanashiensis, Streptomyces virginiae, Streptomyces viridochromogenes, Thermoplasma acidophilum, Vibrio natrigens or Yarrowia lipolytica.

[0244] Especially preferred recombinant microorganisms are Bacillus subtilis, Corynebacterium glutamicum, Escherichia coli, Pseudomonas aeruginosa, Pseudomonas putida, Rhodobacter sphaeroides, Rhodococcus opacus, Saccharomyces cerevisiae and Yarrowia lipolytica.

[0245] Another embodiment of the invention is a method of culturing or growing the recombinant microorganisms as defined above comprising inoculating a culture medium with one or more of said recombinant microorganisms and culturing or growing said recombinant microorganism in culture medium comprising prenol and/or isoprenol.

[0246] Another embodiment of the invention is the use of the recombinant microorganism as defined above or the composition as defined above for the whole cell bio-conversion of prenol and/or isoprenol to one or more isoprenoid or salt thereof or isopentenyl pyrophosphate or salt thereof and/or dimethylallyl pyrophosphate or salt thereof.

[0247] Another embodiment of the invention is a process for whole cell bio-conversion of prenol and/or isoprenol to one or more isoprenoid or salt thereof or IPP or salt thereof and/or DMAPP or salt thereof comprising the steps of
[0248] I) growing the recombinant microorganism as defined above in a fermenter comprising isoprenol and/or prenol, a medium suitable for growing said recombinant microorganism and a C-source, and
[0249] II) recovering the one or more isoprenoid or salt thereof or IPP or salt thereof and/or DMAPP or salt thereof from the fermentation broth obtained in I).

[0250] Another embodiment of the invention is a process for whole cell bio-conversion of prenol and/or isoprenol to one or more isoprenoid or salt thereof or IPP or salt thereof and/or DMAPP or salt thereof comprising the step of
[0251] i) growing the recombinant microorganism as defined above in a fermenter comprising a medium suitable for growing said recombinant microorganism and a C-source, and
[0252] ii) recovering the recombinant microorganism from the fermenter, and
[0253] iii) performing a whole cell bio-conversion in a medium by supplementing isoprenol/prenol, and
[0254] iv) recovering the one or more isoprenoid or salt thereof or IPP and/or DMAPP from the medium obtained in iii).

### DEFINITIONS

[0255] It is to be understood that this invention is not limited to the particular methodology or protocols. It is also to be understood that the terminology used herein is for the purpose of describing particular embodiments only and is not intended to limit the scope of the present invention which will be limited only by the appended claims. It must be noted that as used herein and in the appended claims, the singular forms “a,” “and,” and “the” include plural reference unless the context clearly dictates otherwise. Thus, for example, reference to “a vector” is a reference to one or more vectors and includes equivalents thereof known to those skilled in the art, and so forth. The term “about” is used herein to mean approximately, roughly, around, or in the region of. When the term “about” is used in conjunction with a numerical range, it modifies that range by extending the boundaries above and below the numerical values set forth. In general, the term “about” is used herein to modify a numerical value above and below the stated value by a variance of 20 percent, preferably 10 percent up or down (higher or lower). As used herein, the word or means any one member of a particular list and also includes any combination of members of that list. The words “comprise,” “comprising,” “include,” “including,” and “includes” when used in this specification and in the following claims are intended to specify the presence of one or more stated features, integers, components, or steps, but they do not preclude the presence or addition of one or more other features, integers, components, steps, or groups thereof. For clarity, certain terms used in the specification are defined and used as follows:

[0256] Antiparallel: “Antiparallel” refers herein to two nucleotide sequences paired through hydrogen bonds between complementary base residues with phosphodiester bonds running in the 5′-3′ direction in one nucleotide sequence and in the 3′-5′ direction in the other nucleotide sequence.

[0257] Antisense: The term “antisense” refers to a nucleotide sequence that is inverted relative to its normal orientation for transcription or function and so expresses an RNA transcript that is complementary to a target gene mRNA molecule expressed within the host cell (e.g., it can hybridize to the target gene mRNA molecule or single stranded genomic DNA through Watson-Crick base pairing) or that is complementary to a target DNA molecule such as, for example genomic DNA present in the host cell.

[0258] Coding region: As used herein the term “coding region” when used in reference to a structural gene refers to the nucleotide sequences which encode the amino acids found in the nascent polypeptide as a result of translation of a mRNA molecule. The coding region is bounded, in eukaryotes, on the 5′-side by the nucleotide triplet “ATG” which encodes the initiator methionine and on the 3′-side by one of the three triplets which specify stop codons (i.e., TAA, TAG, TGA). In addition to containing introns, genomic forms of a gene may also include sequences located on both the 5′- and 3′-end of the sequences which are present on the RNA transcript. These sequences are referred to as “flanking” sequences or regions (these flanking sequences are located 5′ or 3′ to the non-translated sequences present on the mRNA transcript). The 5′-flanking region may contain regulatory sequences such as promoters and enhancers which control or influence the transcription of the gene. The 3′-flanking region may contain sequences which direct the termination of transcription, post-transcriptional cleavage and polyadenylation.

[0259] Complementary: “Complementary” or “complementarity” refers to two nucleotide sequences which comprise antiparallel nucleotide sequences capable of pairing with one another (by the base-pairing rules) upon formation of hydrogen bonds between the complementary base residues in the antiparallel nucleotide sequences. For example, the sequence 5′-AGT-3′ is complementary to the sequence 5′-ACT-3′. Complementarity can be “partial” or “total.” “Partial” complementarity is where one or more nucleic acid bases are not matched according to the base pairing rules. “Total” or “complete” complementarity between nucleic acid molecules is where each and every nucleic acid base is matched with another base under the base pairing rules. The degree of complementarity between nucleic acid molecule strands has significant effects on the efficiency and strength of hybridization between nucleic acid molecule strands. A “complement” of a nucleic acid sequence as used herein refers to a nucleotide sequence whose nucleic acid molecules show total complementarity to the nucleic acid molecules of the nucleic acid sequence.

[0260] Donor DNA molecule: As used herein the terms “donor DNA molecule”, “repair DNA molecule” or “template DNA molecule” all used interchangeably herein mean a DNA molecule having a sequence that is to be introduced into the genome of a cell. It may be flanked at the 5′ and/or 3′ end by sequences homologous or identical to sequences in the target region of the genome of said cell. It may comprise sequences not naturally occurring in the respective cell such as ORFs, non-coding RNAs or regulatory elements that shall be introduced into the target region or it may comprise sequences that are homologous to the target region except for at least one mutation, a gene edit: The sequence of the donor DNA molecule may be added to the genome or it may replace a sequence in the genome of the length of the donor DNA sequence.

[0261] Double-stranded RNA: A “double-stranded RNA” molecule or “dsRNA” molecule comprises a sense RNA fragment of a nucleotide sequence and an antisense RNA fragment of the nucleotide sequence, which both comprise nucleotide sequences complementary to one another, thereby allowing the sense and antisense RNA fragments to pair and form a double-stranded RNA molecule.

[0262] Endogenous: An “endogenous” nucleotide sequence refers to a nucleotide sequence, which is present in the genome of the untransformed cell.

[0263] Expression: “Expression” refers to the biosynthesis of a gene product, preferably to the transcription and/or translation of a nucleotide sequence, for example an endogenous gene or a heterologous gene, in a cell. For example, in the case of a structural gene, expression involves transcription of the structural gene into mRNA and—optionally—the subsequent translation of mRNA into one or more polypeptides. In other cases, expression may refer only to the transcription of the DNA harboring an RNA molecule.

[0264] Expression construct: “Expression construct” as used herein means a DNA sequence capable of directing expression of a particular nucleotide sequence in a cell, comprising a promoter functional in said cell into which it will be introduced, operatively linked to the nucleotide sequence of interest which is—optionally—operatively linked to termination signals. If translation is required, it also typically comprises sequences required for proper translation of the nucleotide sequence. The coding region may code for a protein of interest but may also code for a functional RNA of interest, for example RNAa, siRNA, snoRNA, snRNA, microRNA, to-siRNA or any other noncoding regulatory RNA, in the sense or antisense direction. The expression construct comprising the nucleotide sequence of interest may be chimeric, meaning that one or more of its components is heterologous with respect to one or more of its other components. The expression construct may also be one, which is naturally occurring but has been obtained in a recombinant form useful for heterologous expression. Typically, however, the expression construct is heterologous with respect to the host, i.e., the particular DNA sequence of the expression construct does not occur naturally in the host cell and must have been introduced into the host cell or an ancestor of the host cell by a transformation event. The expression of the nucleotide sequence in the expression construct may be under the control of a constitutive promoter or of an inducible promoter, which initiates transcription only when the host cell is exposed to some particular external stimulus.

[0265] Foreign: The term “foreign” refers to any nucleic acid molecule (e.g., gene sequence) which is introduced into the genome of a cell by experimental manipulations and may include sequences found in that cell so long as the introduced sequence contains some modification (e.g., a point mutation, the presence of a selectable marker gene, etc.) and is therefore distinct relative to the naturally-occurring sequence.

[0266] Functional linkage: The term “functional linkage” or “functionally linked” is to be understood as meaning, for example, the sequential arrangement of a regulatory element (e.g. a promoter) with a nucleic acid sequence to be expressed and, if appropriate, further regulatory elements (such as e.g., a terminator) in such a way that each of the regulatory elements can fulfil its intended function to allow, modify, facilitate or otherwise influence expression of said nucleic acid sequence. As a synonym the wording “operable linkage” or “operably linked” may be used. The expression may result depending on the arrangement of the nucleic acid sequences in relation to sense or antisense RNA. To this end, direct linkage in the chemical sense is not necessarily required. Genetic control sequences such as, for example, enhancer sequences, can also exert their function on the target sequence from positions which are further away, or indeed from other DNA molecules. Preferred arrangements are those in which the nucleic acid sequence to be expressed recombinantly is positioned behind the sequence acting as promoter, so that the two sequences are linked covalently to each other. The distance between the promoter sequence and the nucleic acid sequence to be expressed recombinantly is preferably less than 200 base pairs, especially preferably less than 100 base pairs, very especially preferably less than 50 base pairs. In a preferred embodiment, the nucleic acid sequence to be transcribed is located behind the promoter in such a way that the transcription start is identical with the desired beginning of the chimeric RNA of the invention. Functional linkage, and an expression construct, can be generated by means of customary recombination and cloning techniques as described (e.g., in Maniatis T, Fritsch EF and Sambrook J (1989) Molecular Cloning: A Laboratory Manual, 2nd Ed., Cold Spring Harbor Laboratory, Cold Spring Harbor (NY); Silhavy et al. (1984) Experiments with Gene Fusions, Cold Spring Harbor Laboratory, Cold Spring Harbor (NY); Ausubel et al. (1987) Current Protocols in Molecular Biology, Greene Publishing Assoc. and Wiley Interscience). However, further sequences, which, for example, act as a linker with specific cleavage sites for restriction enzymes, or as a signal peptide, may also be positioned between the two sequences. The insertion of sequences may also lead to the expression of fusion proteins. Preferably, the expression construct, consisting of a linkage of a regulatory region for example a promoter and nucleic acid sequence to be expressed, can exist in a vector-integrated form and be inserted into a genome, for example by transformation.

[0267] Gene: The term “gene” refers to a region operably joined to appropriate regulatory sequences capable of regulating the expression of the gene product (e.g., a polypeptide or a functional RNA) in some manner. A gene includes untranslated regulatory regions of DNA (e.g., promoters, enhancers, repressors, etc.) preceding (up-stream) and following (downstream) the coding region (open reading frame, ORF) as well as, where applicable, intervening sequences (i.e., introns) between individual coding regions (i.e., exons). The term “structural gene” as used herein is intended to mean a DNA sequence that is transcribed into mRNA which is then translated into a sequence of amino acids characteristic of a specific polypeptide.

[0268] “Gene edit” when used herein means the introduction of a specific mutation at a specific position of the genome of a cell. The gene edit may be introduced by precise editing applying more advanced technologies e.g. using a CRISPR Cas system and a donor DNA, or a CRISPR Cas system linked to mutagenic activity such as a deaminase (WO15133554, WO17070632).

[0269] Genome and genomic DNA: The terms “genome” or “genomic DNA” is referring to the heritable genetic information of a host organism. Said genomic DNA comprises the DNA of the nucleus (also referred to as chromosomal DNA) but also the DNA of the plastids (e.g., chloroplasts) and other cellular organelles (e.g., mitochondria). Preferably the terms genome or genomic DNA is referring to the chromosomal DNA of the nucleus.

[0270] Heterologous: The term “heterologous” with respect to a nucleic acid molecule or DNA refers to a nucleic acid molecule which is operably linked to, or is manipulated to become operably linked to, a second nucleic acid molecule, e.g. a promoter to which it is not operably linked in nature, e.g. in the genome of a WT cell, or to which it is operably linked at a different location or position in nature, e.g. in the genome of a WT cell.

[0271] Preferably the term “heterologous” with respect to a nucleic acid molecule or DNA refers to a nucleic acid molecule which is operably linked to, or is manipulated to become operably linked to, a second nucleic acid molecule, e.g. a promoter or an open reading frame to which it is not operably linked in nature.

[0272] A heterologous expression construct comprising a nucleic acid molecule and one or more regulatory nucleic acid molecule (such as a promoter or a transcription termination signal) linked thereto for example is a constructs originating by experimental manipulations in which either a) said nucleic acid molecule, or b) said regulatory nucleic acid molecule or c) both (i.e. (a) and (b)) is not located in its natural (native) genetic environment or has been modified by experimental manipulations, an example of a modification being a substitution, addition, deletion, inversion or insertion of one or more nucleotide residues. Natural genetic environment refers to the natural chromosomal locus in the organism of origin, or to the presence in a genomic library. In the case of a genomic library, the natural genetic environment of the sequence of the nucleic acid molecule is preferably retained, at least in part. The environment flanks the nucleic acid sequence at least at one side and has a sequence of at least 50 bp, preferably at least 500 bp, especially preferably at least 1,000 bp, very especially preferably at least 5,000 bp, in length. A naturally occurring expression construct—for example the naturally occurring combination of a promoter with the corresponding gene—becomes a transgenic expression construct when it is modified by non-natural, synthetic “artificial” methods such as, for example, mutagenization. Such methods have been described (U.S. Pat. No. 5,565,350; WO 00/15815). For example, a protein encoding nucleic acid molecule operably linked to a promoter, which is not the native promoter of this molecule, is considered to be heterologous with respect to the promoter. Preferably, heterologous DNA is not endogenous to or not naturally associated with the cell into which it is introduced, but has been obtained from another cell or has been synthesized. Heterologous DNA also includes an endogenous DNA sequence, which contains some modification, non-naturally occurring, multiple copies of an endogenous DNA sequence, or a DNA sequence which is not naturally associated with another DNA sequence physically linked thereto. Generally, although not necessarily, heterologous DNA encodes RNA or proteins that are not normally produced by the cell into which it is expressed.

[0273] Hybridization: The term “hybridization” as defined herein is a process wherein substantially complementary nucleotide sequences anneal to each other. The hybridisation process can occur entirely in solution, i.e. both complementary nucleic acids are in solution. The hybridisation process can also occur with one of the complementary nucleic acids immobilised to a matrix such as magnetic beads, Sepharose beads or any other resin. The hybridisation process can furthermore occur with one of the complementary nucleic acids immobilised to a solid support such as a nitro-cellulose or nylon membrane or immobilised by e.g. photolithography to, for example, a siliceous glass support (the latter known as nucleic acid arrays or microarrays or as nucleic acid chips). In order to allow hybridisation to occur, the nucleic acid molecules are generally thermally or chemically denatured to melt a double strand into two single strands and/or to remove hairpins or other secondary structures from single stranded nucleic acids.

[0274] The term “stringency” refers to the conditions under which a hybridisation takes place. The stringency of hybridisation is influenced by conditions such as temperature, salt concentration, ionic strength and hybridisation buffer composition. Generally, low stringency conditions are selected to be about 30° C. lower than the thermal melting point (Tm) for the specific sequence at a defined ionic strength and pH. Medium stringency conditions are when the temperature is 20° C. below Tm, and high stringency conditions are when the temperature is 10° C. below Tm. High stringency hybridisation conditions are typically used for isolating hybridising sequences that have high sequence similarity to the target nucleic acid sequence. However, nucleic acids may deviate in sequence and still encode a substantially identical polypeptide, due to the degeneracy of the genetic code. Therefore, medium stringency hybridisation conditions may sometimes be needed to identify such nucleic acid molecules.

[0275] The “Tm” is the temperature under defined ionic strength and pH, at which 50% of the target sequence hybridises to a perfectly matched probe. The Tm is dependent upon the solution conditions and the base composition and length of the probe. For example, longer sequences hybridise specifically at higher temperatures. The maximum rate of hybridisation is obtained from about 16° C. up to 32° C. below Tm. The presence of monovalent cations in the hybridisation solution reduce the electrostatic repulsion between the two nucleic acid strands thereby promoting hybrid formation; this effect is visible for sodium concentrations of up to 0.4 M (for higher concentrations, this effect may be ignored). Formamide reduces the melting temperature of DNA-DNA and DNA-RNA duplexes with 0.6 to 0.7° C. for each percent formamide, and addition of 50% formamide allows hybridisation to be performed at 30 to 45° C., though the rate of hybridisation will be lowered. Base pair mismatches reduce the hybridisation rate and the thermal stability of the duplexes. On average and for large probes, the Tm decreases about 1° C. per % base mismatch. The Tm may be calculated using the following equations, depending on the types of hybrids:

[0276] DNA-DNA hybrids (Meinkoth and Wahl, Anal. Biochem., 138: 267-284, 1984):

Tm=81.5° C.+16.6xlog[Na+]a+0.41x%[G/Cb]−500x[Lc]−1−0.61x% formamide

[0277] DNA-RNA or RNA-RNA hybrids:

Tm=79.8+18.5 (log10[Na+]a)+0.58 (%G/Cb)+11.8 (%G/Cb)2-820/Lc

[0278] oligo-DNA or oligo-RNAd hybrids:

[0279] For <20 nucleotides: Tm=2 (In)

[0280] For 20-35 nucleotides: Tm=22+1.46 (In)

[0281] a or for other monovalent cation, but only accurate in the 0.01-0.4 M range.

[0282] b only accurate for %GC in the 30% to 75% range.

[0283] c L=length of duplex in base pairs.

[0284] d Oligo, oligonucleotide; In, effective length of primer=2p33 (no. of G/C)+(no. of NT).

[0285] Non-specific binding may be controlled using any one of a number of known techniques such as, for example, blocking the membrane with protein containing solutions, additions of heterologous RNA, DNA, and SDS to the hybridisation buffer, and treatment with Rnase. For non-related probes, a series of hybridizations may be performed by varying one of (i) progressively lowering the annealing temperature (for example from 68° C. to 42° C.) or (ii) progressively lowering the formamide concentration (for example from 50% to 0%). The skilled artisan is aware of various parameters which may be altered during hybridisation and which will either maintain or change the stringency conditions.

[0286] Besides the hybridisation conditions, specificity of hybridisation typically also depends on the function of post-hybridisation washes. To remove background resulting from non-specific hybridisation, samples are washed with dilute salt solutions. Critical factors of such washes include the ionic strength and temperature of the final wash solution: the lower the salt concentration and the higher the wash temperature, the higher the stringency of the wash. Wash conditions are typically performed at or below hybridisation stringency. A positive hybridisation gives a signal that is at least twice of that of the background. Generally, suitable stringent conditions for nucleic acid hybridisation assays or gene amplification detection procedures are as set forth above. More or less stringent conditions may also be selected. The skilled artisan is aware of various parameters which may be altered during washing and which will either maintain or change the stringency conditions.

[0287] For example, typical high stringency hybridisation conditions for DNA hybrids longer than 50 nucleotides encompass hybridisation at 65° C. in 1×SSC or at 42° C. in 1×SSC and 50% formamide, followed by washing at 65° C. in 0.3×SSC. Examples of medium stringency hybridisation conditions for DNA hybrids longer than 50 nucleotides encompass hybridisation at 50° C. in 4×SSC or at 40° C. in 6×SSC and 50% formamide, followed by washing at 50° C. in 2×SSC. The length of the hybrid is the anticipated length for the hybridising nucleic acid. When nucleic acids of known sequence are hybridised, the hybrid length may be determined by aligning the sequences and identifying the conserved regions described herein. 1×SSC is 0.15 M NaCl and 15 mM sodium citrate; the hybridisation solution and wash solutions may additionally include 5× Denhardt's reagent, 0.5-1.0% SDS, 100 μg/ml denatured, fragmented salmon sperm DNA, 0.5% sodium pyrophosphate. Another example of high stringency conditions is hybridisation at 65° C. in 0.1×SSC comprising 0.1 SDS and optionally 5× Denhardt's reagent, 100 pg/mI denatured, fragmented salmon sperm DNA, 0.5% sodium pyrophosphate, followed by the washing at 65° C. in 0.3×SSC.

[0288] For the purposes of defining the level of stringency, reference can be made to Sambrook et al. (2001) Molecular Cloning: a laboratory manual, 3rd Edition, Cold Spring Harbor Laboratory Press, CSH, New York or to Current Protocols in Molecular Biology, John Wiley & Sons, N.Y. (1989 and yearly updates).

[0289] “Identity”: “Identity” when used in respect to the comparison of two or more nucleic acid or amino acid molecules means that the sequences of said molecules share a certain degree of sequence similarity, the sequences being partially identical.

[0290] Enzyme variants may be defined by their sequence identity when compared to a parent enzyme. Sequence identity usually is provided as “% sequence identity” or “% identity”. To determine the percent-identity between two amino acid sequences in a first step a pairwise sequence alignment is generated between those two sequences, wherein the two sequences are aligned over their complete length (i.e., a pairwise global alignment). The alignment is generated with a program implementing the Needleman and Wunsch algorithm (J. Mol. Biol. (1979) 48, p. 443-453), preferably by using the program “NEEDLE” (The European Molecular Biology Open Software Suite (EMBOSS)) with the programs default parameters (gapopen=10.0, gapextend=0.5 and matrix=EBLOSUM62). The preferred alignment for the purpose of this invention is that alignment, from which the highest sequence identity can be determined.

[0291] The following example is meant to illustrate two nucleotide sequences, but the same calculations apply to protein sequences:

Seq A: AAGATACTG length: 9 bases
Seq B: GATCTGA length: 7 bases

[0292] Hence, the shorter sequence is sequence B.

[0293] Producing a pairwise global alignment which is showing both sequences over their complete lengths results in

Seq A: AAGATACTG-
||| |||
Seq B: --GAT-CTGA

[0294] The “I” symbol in the alignment indicates identical residues (which means bases for DNA or amino acids for proteins). The number of identical residues is 6.

[0295] The “-” symbol in the alignment indicates gaps. The number of gaps introduced by alignment within the Seq B is 1. The number of gaps introduced by alignment at borders of Seq B is 2, and at borders of Seq A is 1.

[0296] The alignment length showing the aligned sequences over their complete length is 10.

[0297] Producing a pairwise alignment which is showing the shorter sequence over its complete length according to the invention consequently results in:

Seq A: GATACTG-
||| |||
Seq B: GAT-CTGA

[0298] Producing a pairwise alignment which is showing sequence A over its complete length according to the invention consequently results in:

Seq A: AAGATACTG
||| |||
Seq B: --GAT-CTG

[0299] Producing a pairwise alignment which is showing sequence B over its complete length according to the invention consequently results in:

Seq A: GATACTG-
||| |||
Seq B: GAT-CTGA

[0300] The alignment length showing the shorter sequence over its complete length is 8 (one gap is present which is factored in the alignment length of the shorter sequence).

[0301] Accordingly, the alignment length showing Seq A over its complete length would be 9 (meaning Seq A is the sequence of the invention).

[0302] Accordingly, the alignment length showing Seq B over its complete length would be 8 (meaning Seq B is the sequence of the invention).

[0303] After aligning two sequences, in a second step, an identity value is determined from the alignment produced. For purposes of this description, percent identity is calculated by %-identity=(identical residues/length of the alignment region which is showing the respective sequence of this invention over its complete length) *100. Thus, sequence identity in relation to comparison of two amino acid sequences according to this embodiment is calculated by dividing the number of identical residues by the length of the alignment region which is showing the respective sequence of this invention over its complete length. This value is multiplied with 100 to give “%-identity”.

[0304] According to the example provided above, %-identity is: for Seq A being the sequence of the invention (6/9)*100 =66.7%; for Seq B being the sequence of the invention (6/8)*100 =75%.

[0305] InDel is a term for the random insertion or deletion of bases in the genome of an organism associated with the repair of a DSB by NHEJ. It is classified among small genetic variations, measuring from 1 to 10 000 base pairs in length. As used herein it refers to random insertion or deletion of bases in or in the close vicinity (e.g. less than 1000 bp, 900 bp, 800 bp, 700 bp, 600 bp, 500 bp, 400 bp, 300 bp, 250 bp, 200 bp, 150 bp, 100 bp, 50 bp, 40 bp, 30 bp, 25 bp, 20 bp, 15 bp, 10 bp or 5 bp up and/or downstream) of the target site.

[0306] The term “Introducing”, “introduction” and the like with respect to the introduction of a donor DNA molecule in the target site of a target DNA means any introduction of the sequence of the donor DNA molecule into the target region for example by the physical integration of the donor DNA molecule or a part thereof into the target region or the introduction of the sequence of the donor DNA molecule or a part thereof into the target region wherein the donor DNA is used as template for a polymerase.

[0307] Intron: refers to sections of DNA (intervening sequences) within a gene that do not encode part of the protein that the gene produces, and that is spliced out of the mRNA that is transcribed from the gene before it is exported from the cell nucleus. Intron sequence refers to the nucleic acid sequence of an intron. Thus, introns are those regions of DNA sequences that are transcribed along with the coding sequence (exons) but are removed during the formation of mature mRNA. Introns can be positioned within the actual coding region or in either the 5′ or 3′ untranslated leaders of the pre-mRNA (unspliced mRNA). Introns in the primary transcript are excised and the coding sequences are simultaneously and precisely ligated to form the mature mRNA. The junctions of introns and exons form the splice site. The sequence of an intron begins with GU and ends with AG. Furthermore, in plants, two examples of AU-AC introns have been described: the fourteenth intron of the RecA-like protein gene and the seventh intron of the G5 gene from Arabidopsis thaliana are AT-AC introns. Pre-mRNAs containing introns have three short sequences that are —beside other sequences- essential for the intron to be accurately spliced. These sequences are the 5′ splice-site, the 3′ splice-site, and the branchpoint. mRNA splicing is the removal of intervening sequences (introns) present in primary mRNA transcripts and joining or ligation of exon sequences. This is also known as cis-splicing which joins two exons on the same RNA with the removal of the intervening sequence (intron). The functional elements of an intron is comprising sequences that are recognized and bound by the specific protein components of the spliceosome (e.g. splicing consensus sequences at the ends of introns). The interaction of the functional elements with the spliceosome results in the removal of the intron sequence from the premature mRNA and the rejoining of the exon sequences. Introns have three short sequences that are essential—although not sufficient—for the intron to be accurately spliced. These sequences are the 5′ splice site, the 3′ splice site and the branch point. The branchpoint sequence is important in splicing and splice-site selection. The branchpoint sequence is usually located 10-60 nucleotides upstream of the 3′ splice site.

[0308] Isogenic: organisms, which are genetically identical, except that they may differ by the presence or absence of a heterologous DNA sequence.

[0309] Isolated: The term “isolated” as used herein means that a material has been removed by the hand of man and exists apart from its original, native environment and is therefore not a product of nature. An isolated material or molecule (such as a DNA molecule or enzyme) may exist in a purified form or may exist in a non-native environment such as, for example, in a transgenic host cell. For example, a naturally occurring polynucleotide or polypeptide present in a living cell is not isolated, but the same polynucleotide or polypeptide, separated from some or all of the coexisting materials in the natural system, is isolated. Such polynucleotides can be part of a vector and/or such polynucleotides or polypeptides could be part of a composition and would be isolated in that such a vector or composition is not part of its original environment. Preferably, the term “isolated” when used in relation to a nucleic acid molecule, as in “an isolated nucleic acid sequence” refers to a nucleic acid sequence that is identified and separated from at least one contaminant nucleic acid molecule with which it is ordinarily associated in its natural source. Isolated nucleic acid molecule is nucleic acid molecule present in a form or setting that is different from that in which it is found in nature. In contrast, non-isolated nucleic acid molecules are nucleic acid molecules such as DNA and RNA, which are found in the state they exist in nature. For example, a given DNA sequence (e.g., a gene) is found on the host cell chromosome in proximity to neighbouring genes; RNA sequences, such as a specific mRNA sequence encoding a specific protein, are found in the cell as a mixture with numerous other mRNAs, which encode a multitude of proteins. However, an isolated nucleic acid sequence comprising for example SEQ ID NO: 2 includes, by way of example, such nucleic acid sequences in cells which ordinarily contain SEQ ID NO:2 where the nucleic acid sequence is in a chromosomal or extrachromosomal location different from that of natural cells or is otherwise flanked by a different nucleic acid sequence than that found in nature. The isolated nucleic acid sequence may be present in single-stranded or double-stranded form. When an isolated nucleic acid sequence is to be utilized to express a protein, the nucleic acid sequence will contain at a minimum at least a portion of the sense or coding strand (i.e., the nucleic acid sequence may be single-stranded). Alternatively, it may contain both the sense and anti-sense strands (i.e., the nucleic acid sequence may be double-stranded).

[0310] Minimal Promoter: promoter elements, particularly a TATA element, that are inactive or that have greatly reduced promoter activity in the absence of upstream activation. In the presence of a suitable transcription factor, the minimal promoter functions to permit transcription.

[0311] Non-coding: The term “non-coding” refers to sequences of nucleic acid molecules that do not encode part or all of an expressed protein. Non-coding sequences include but are not limited to introns, enhancers, promoter regions, 3′ untranslated regions, and 5′ untranslated regions.

[0312] Nucleic acids and nucleotides: The terms “Nucleic Acids” and “Nucleotides” refer to naturally occurring or synthetic or artificial nucleic acid or nucleotides. The terms “nucleic acids” and “nucleotides” comprise deoxyribonucleotides or ribonucleotides or any nucleotide analogue and polymers or hybrids thereof in either single- or double-stranded, sense or antisense form. Unless otherwise indicated, a particular nucleic acid sequence also implicitly encompasses conservatively modified variants thereof (e.g., degenerate codon substitutions) and complementary sequences, as well as the sequence explicitly indicated. The term “nucleic acid” is used interchangeably herein with “gene”, “cDNA, “mRNA”, “oligonucleotide,” and “polynucleotide”. Nucleotide analogues include nucleotides having modifications in the chemical structure of the base, sugar and/or phosphate, including, but not limited to, 5-position pyrimidine modifications, 8-position purine modifications, modifications at cytosine exocyclic amines, substitution of 5-bromouracil, and the like; and 2′-position sugar modifications, including but not limited to, sugar-modified ribonucleotides in which the 2′-OH is replaced by a group selected from H, OR, R, halo, SH, SR, NH2, NHR, NR2, or CN. Short hairpin RNAs (shRNAs) also can comprise non-natural elements such as non-natural bases, e.g., ionosin and xanthine, non-natural sugars, e.g., 2′-methoxy ribose, or non-natural phosphodiester linkages, e.g., methylphosphonates, phosphorothioates and peptides.

[0313] Nucleic acid sequence: The phrase “nucleic acid sequence” refers to a single or double-stranded polymer of deoxyribonucleotide or ribonucleotide bases read from the 5′- to the 3′-end. It includes chromosomal DNA, self-replicating plasmids, infectious polymers of DNA or RNA and DNA or RNA that performs a primarily structural role. “Nucleic acid sequence” also refers to a consecutive list of abbreviations, letters, characters or words, which represent nucleotides. In one embodiment, a nucleic acid can be a “probe” which is a relatively short nucleic acid, usually less than 100 nucleotides in length. Often a nucleic acid probe is from about 50 nucleotides in length to about 10 nucleotides in length. A “target region” of a nucleic acid is a portion of a nucleic acid that is identified to be of interest. A “coding region” of a nucleic acid is the portion of the nucleic acid, which is transcribed and translated in a sequence-specific manner to produce into a particular polypeptide or protein when placed under the control of appropriate regulatory sequences. The coding region is said to encode such a polypeptide or protein.

[0314] Oligonucleotide: The term “oligonucleotide” refers to an oligomer or polymer of ribonucleic acid (RNA) or deoxyribonucleic acid (DNA) or mimetics thereof, as well as oligonucleotides having non-naturally occurring portions which function similarly. Such modified or substituted oligonucleotides are often preferred over native forms because of desirable properties such as, for example, enhanced cellular uptake, enhanced affinity for nucleic acid target and increased stability in the presence of nucleases. An oligonucleotide preferably includes two or more nucleomonomers covalently coupled to each other by linkages (e.g., phosphodiesters) or substitute linkages.

[0315] Overhang: An “overhang” is a relatively short single-stranded nucleotide sequence on the 5′- or 3′-hydroxyl end of a double-stranded oligonucleotide molecule (also referred to as an “extension,” “protruding end,” or “sticky end”).

[0316] Polypeptide: The terms “polypeptide”, “peptide”, “oligopeptide”, “polypeptide”, “gene product”, “expression product” and “protein” are used interchangeably herein to refer to a polymer or oligomer of consecutive amino acid residues.

[0317] Pre-protein: Protein, which is normally targeted to a cellular organelle, such as a chloroplast, and still comprising its transit peptide.

[0318] “Precise” with respect to the introduction of a donor DNA molecule in target region means that the sequence of the donor DNA molecule is introduced into the target region without any InDels, duplications or other mutations as compared to the unaltered DNA sequence of the target region that are not comprised in the donor DNA molecule sequence.

[0319] Primary transcript: The term “primary transcript” as used herein refers to a premature RNA transcript of a gene. A “primary transcript” for example still comprises introns and/or is not yet comprising a polyA tail or a cap structure and/or is missing other modifications necessary for its correct function as transcript such as for example trimming or editing.

[0320] Promoter: The terms “promoter”, or “promoter sequence” are equivalents and as used herein, refer to a DNA sequence which when ligated to a nucleotide sequence of interest is capable of controlling the transcription of the nucleotide sequence of interest into RNA. A promoter is located 5′ (i.e., upstream), proximal to the transcriptional start site of a nucleotide sequence of interest whose transcription into mRNA it controls and provides a site for specific binding by RNA polymerase and other transcription factors for initiation of transcription. Said promoter comprises for example the at least 10 kb, for example 5 kb or 2 kb proximal to the transcription start site. It may also comprise the at least 1500 bp proximal to the transcriptional start site, preferably the at least 1000 bp, more preferably the at least 500 bp, even more preferably the at least 400 bp, the at least 300 bp, the at least 200 bp or the at least 100 bp. In a further preferred embodiment, the promoter comprises the at least 50 bp proximal to the transcription start site, for example, at least 25 bp. The promoter does not comprise exon and/or intron regions or 5′ untranslated regions. The promoter may for example be heterologous or homologous to the respective cell. A polynucleotide sequence is “heterologous to” an organism or a second polynucleotide sequence if it originates from a foreign species, or, if from the same species, is modified from its original form. For example, a promoter operably linked to a heterologous coding sequence refers to a coding sequence from a species different from that from which the promoter was derived, or, if from the same species, a coding sequence which is not naturally associated with the promoter (e.g. a genetically engineered coding sequence or an allele from a different ecotype or variety). Suitable promoters can be derived from genes of the host cells where expression should occur or from pathogens for this host cells (e.g. viruses). If a promoter is an inducible promoter, then the rate of transcription increases in response to an inducing agent. The term “constitutive” when made in reference to a promoter or the expression derived from a promoter means that the promoter is capable of directing transcription of an operably linked nucleic acid molecule in the absence of a stimulus (e.g., heat shock, chemicals, light, etc.) in cells throughout substantially the entire lifespan of said cell.

[0321] Promoter specificity: The term “specificity” when referring to a promoter means the pattern of expression conferred by the respective promoter. The specificity describes the developmental status of a cell, in which the promoter is conferring expression of the nucleic acid molecule under the control of the respective promoter. Specificity of a promoter may also comprise the environmental conditions, under which the promoter may be activated or down-regulated such as induction or repression by biological or environmental stresses such as cold, drought or infection.

[0322] Purified: As used herein, the term “purified” refers to molecules, either nucleic or amino acid sequences that are removed from their natural environment, isolated or separated. “Substantially purified” molecules are at least 60% free, preferably at least 75% free, and more preferably at least 90% free from other components with which they are naturally associated. A purified nucleic acid sequence may be an isolated nucleic acid sequence.

[0323] Recombinant: The term “recombinant” with respect to nucleic acid molecules refers to nucleic acid molecules produced by recombinant DNA techniques. Recombinant nucleic acid molecules may also comprise molecules, which as such does not exist in nature but are modified, changed, mutated or otherwise manipulated by man. Preferably, a “recombinant nucleic acid molecule” is a non-naturally occurring nucleic acid molecule that differs in sequence from a naturally occurring nucleic acid molecule by at least one nucleic acid. A “recombinant nucleic acid molecule” may also comprise a “recombinant construct” which comprises, preferably operably linked, a sequence of nucleic acid molecules not naturally occurring in that order. Preferred methods for producing said recombinant nucleic acid molecule may comprise cloning techniques, directed or non-directed mutagenesis, synthesis or recombination techniques.

[0324] Sense: The term “sense” is understood to mean a nucleic acid molecule having a sequence which is complementary or identical to a target sequence, for example a sequence which binds to a protein transcription factor and which is involved in the expression of a given gene. According to a preferred embodiment, the nucleic acid molecule comprises a gene of interest and elements allowing the expression of the said gene of interest.

[0325] Significant increase or decrease: An increase or decrease, for example in enzymatic activity or in gene expression, that is larger than the margin of error inherent in the measurement technique, preferably an increase or decrease by about 2-fold or greater of the activity of the control enzyme or expression in the control cell, more preferably an increase or decrease by about 5-fold or greater, and most preferably an increase or decrease by about 10-fold or greater.

[0326] Small nucleic acid molecules: “small nucleic acid molecules” are understood as molecules consisting of nucleic acids or derivatives thereof such as RNA or DNA. They may be double-stranded or single-stranded and are between about 15 and about 30 bp, for example between 15 and 30 bp, more preferred between about 19 and about 26 bp, for example between 19 and 26 bp, even more preferred between about 20 and about 25 bp for example between 20 and 25 bp. In an especially preferred embodiment, the oligonucleotides are between about 21 and about 24 bp, for example between 21 and 24 bp. In a most preferred embodiment, the small nucleic acid molecules are about 21 bp and about 24 bp, for example 21 bp and 24 bp.

[0327] Substantially complementary: In its broadest sense, the term “substantially complementary”, when used herein with respect to a nucleotide sequence in relation to a reference or target nucleotide sequence, means a nucleotide sequence having a percentage of identity between the substantially complementary nucleotide sequence and the exact complementary sequence of said reference or target nucleotide sequence of at least 60%, more desirably at least 70%, more desirably at least 80% or 85%, preferably at least 90%, more preferably at least 93%, still more preferably at least 95% or 96%, yet still more preferably at least 97% or 98%, yet still more preferably at least 99% or most preferably 100% (the latter being equivalent to the term “identical” in this context). Preferably identity is assessed over a length of at least 19 nucleotides, preferably at least 50 nucleotides, more preferably the entire length of the nucleic acid sequence to said reference sequence (if not specified otherwise below). Sequence comparisons are carried out using default GAP analysis with the University of Wisconsin GCG, SEQWEB application of GAP, based on the algorithm of Needleman and Wunsch (Needleman and Wunsch (1970) J Mol. Biol. 48: 443-453; as defined above). A nucleotide sequence “substantially complementary ” to a reference nucleotide sequence hybridizes to the reference nucleotide sequence under low stringency conditions, preferably medium stringency conditions, most preferably high stringency conditions (as defined above).

[0328] “Target region” as used herein means the region close to, for example 10 bases, 20 bases, 30 bases, 40 bases, 50 bases, 60 bases, 70 bases, 80 bases, 90 bases, 100 bases, 125 bases, 150 bases, 200 bases or 500 bases or more away from the target site, or including the target site in which the sequence of the donor DNA molecule is introduced into the genome of a cell.

[0329] “Target site” as used herein means the position in the genome at which a double strand break or one or a pair of single strand breaks (nicks) are induced using recombinant technologies such as Zn-finger, TALEN, restriction enzymes, homing endonucleases, RNA-guided nucleases, RNA-guided nickases such as CRISPR/Cas nucleases or nickases and the like.

[0330] Transgene: The term “transgene” as used herein refers to any nucleic acid sequence, which is introduced into the genome of a cell by experimental manipulations. A transgene may be an “endogenous DNA sequence,” or a “heterologous DNA sequence” (i.e., “foreign DNA”). The term “endogenous DNA sequence” refers to a nucleotide sequence, which is naturally found in the cell into which it is introduced so long as it does not contain some modification (e.g., a point mutation, the presence of a selectable marker gene, etc.) relative to the naturally-occurring sequence.

[0331] Transgenic: The term transgenic when referring to an organism means transformed, preferably stably transformed, with a recombinant DNA molecule that preferably comprises a suitable promoter operatively linked to a DNA sequence of interest.

[0332] Vector: As used herein, the term “vector” refers to a nucleic acid molecule capable of transporting another nucleic acid molecule to which it has been linked. One type of vector is a genomic integrated vector, or “integrated vector”, which can become integrated into the chromosomal DNA of the host cell. Another type of vector is an episomal vector, i.e., a nucleic acid molecule capable of extra-chromosomal replication. Vectors capable of directing the expression of genes to which they are operatively linked are referred to herein as “expression vectors”. In the present specification, “plasmid” and “vector” are used interchangeably unless otherwise clear from the context. Expression vectors designed to produce RNAs as described herein in vitro or in vivo may contain sequences recognized by any RNA polymerase, including mitochondrial RNA polymerase, RNA pol I, RNA pol II, and RNA pol III. These vectors can be used to transcribe the desired RNA molecule in the cell according to this invention.

[0333] Wild-type: The term “wild-type”, “natural” or “natural origin” means with respect to an organism, polypeptide, or nucleic acid sequence, that said organism is naturally occurring or available in at least one naturally occurring organism which is not changed, mutated, or otherwise manipulated by man.

### FIGURES

[0334] FIG. 1 shows reactions catalysed by kinase 1. (A) Synthesis of isopentenyl phosphate (IP) from isoprenol and (B) Synthesis of Dimethylallyl phosphate (DMAP) from prenol.

[0335] FIG. 2 shows the screening results for kinase 1. Enzyme activity was monitored by measuring IP formation in cleared E. coli cell lysates supplemented with isoprenol in the presence of ATP and MgC12.

[0336] FIG. 3 shows reactions catalysed by kinase 2. (A) Synthesis of isopentenyl diphosphate (IPP) from IP and (B) Synthesis of Dimethylallyl diphosphate (DMAPP) from DMAP.

[0337] FIG. 4 shows the screening results for kinase 2. Enzyme activity was monitored by measuring IPP formation in cleared E. coli cell lysates supplemented with IP in the presence of ATP and MgCl₂.

[0338] FIG. 5 shows the cascade reaction of kinase 1 and 2. (A) Synthesis of IPP from isoprenol and (B) Synthesis of DMAPP from prenol.

[0339] FIG. 6 shows an example of the cascade reaction of kinase 1 (SEQ ID NO 43) and kinase 2 converting isoprenol to IPP. Enzyme activity was monitored by measuring IPP formation in cleared E. coli cell lysates supplemented with isoprenol in the presence of ATP and MgC12.

[0340] FIG. 7 shows the screening results for kinase 1. Enzyme activity was monitored by measuring IP formation in cleared E. coli cell lysates supplemented with isoprenol in the presence of ATP and MgCl₂.

[0341] FIG. 8 shows the screening results for kinase 2. Enzyme activity was monitored by measuring IPP formation in cleared E. coli cell lysates supplemented with IP in the presence of ATP and MgCl₂.

[0342] FIG. 9 shows the cellular (in vivo) production of IP over time. Depicted are the concentrations of IP normalized to the OD600 of the culture. Values are the result of three independent measurements and error bars indicate the standard deviation.

[0343] FIG. 10 shows the cellular (in vivo) production of IPP over time. Depicted are the concentrations of IPP normalized to the OD600 of the culture. Values are the result of three independent measurements and error bars indicate the standard deviation.

### EXAMPLES

### Chemicals and Common Methods

[0344] Unless indicated otherwise, cloning procedures carried out for the purposes of the present invention including restriction digest, agarose gel electrophoresis, purification of nucleic acids, Ligation of nucleic acids, transformation, selection and cultivation of bacterial cells were performed as described (Sambrook et al., 1989). Sequence analyses of recombinant DNA were performed with a laser fluorescence DNA sequencer (Applied Biosystems, Foster City, CA, USA) using the Sanger technology (Sanger et al., 1977). Unless described otherwise, chemicals and reagents were obtained from Sigma Aldrich (Sigma Aldrich, St. Louis, USA), from Promega (Madison, WI, USA), Duchefa (Haarlem, The Netherlands) or Invitrogen (Carlsbad, CA, USA). Restriction endonucleases were from New England Biolabs (Ipswich, MA, USA) or Roche Diagnostics GmbH (Penzberg, Germany). Oligonucleotides were synthesized by Eurofins Eurofins Genomics (Ebersberg, Germany) or Integrated DNA Technologies (Coralville, IA, USA).

### Example 1

### Cloning of Kinases

[0345] The amino acid sequences of the kinases were identified from public databases. The respective DNA sequences were derived thereof using standard codon usage of Escherichia coli. The DNA sequences were synthesized (BioCat GmbH) and cloned into the plasmid pDHE19.2 (Ress-Loeschke, M. et al., DE 19848129, 1998, (BASF AG)). The resulting plasmids were used to transform competent cells (Chung, C. T. et al., Proc Natl Acad Sci U S A, 1989, 86, 2172) of the E. coli strain TG10, pAgro, pHSG575 (E. coli TG10 (Kesseler, M. et al., WO2004050877A1, 2004, (BASF AG)):rhaA⁻-derivate of E. coli TG1(DSMZ 6056) transformed with pHSG575 (Takeshita, S. et al., Gene, 1987, 61, 63) and pAgro4 (pBB541 in Tomoyasu, T. et al., Mol. Microbiol., 2001, 40, 397).

### Example 2

### Recombinant Production of Kinases

[0346] E. coli TG10 carrying the recombinant plasmids of the kinases were used to inoculate 25 ml LB medium (Bertani, G., J Bacteriol, 1951, 62, 293) supplemented with 100 μg/ml ampicillin, 100 pg/ml spectinomycin, 20 pg/ml chloramphenicol, 0.1 mM isopropyl-β-D-thiogalactopyranosid, and 0.5 g/ml rhamnose in a 100 ml baffled Erlenmeyer-flask. The culture was incubated at 37° C. for 18 h under shaking conditions. Subsequently, the biomass was harvested by centrifugation at 5000×g for 10 min. Cells were washed in buffer (50 mM TRIS*HCl, 1 mM MgCl₂ at pH 7.0) before being resuspended in 1 ml of the same buffer.

[0347] The cell free cleared raw lysates were prepared by breaking 300 mg biomass with 0.7 ml quartz-beads (∅0.1 mm) in a homogenizer (Peqlab Precellys24, VWR) for two 30 second cycles. In between cycles samples were chilled on ice. The resulting cell free lysates were cleared by centrifugation 20817×g at 10° C. The supernatant (=cleared cell lysate) was isolated and it commonly contained 10 to 15 mg/ml of protein.

### Example 3

### Enzyme Screening

[0348] Kinase 1, Conversion of Isoprenol to Isopentenyl Phosphate (IP)

[0349] Enzyme activity was assessed in a screening assay. In that regard, buffer (50 mM NH₄HCO₃ at pH 7.5) was supplemented with 5 mM isoprenol (BASF production), 15 mM ATP, 20 mM MgCl₂. The reactions were initiated by adding 20 vol-% (final) of the cleared cell lysate. Subsequently, reactions were incubated at 37° C., 300 rpm, for 24 hours in a thermomixer (Eppendorf) before being quenched by 1:5 dilution with acetonitrile and vigorous mixing. Quenched reactions were cleared by centrifugation at 14,100×g for 5 min at room temperature and the resulting supernatant was used to quantify the levels of IP and isopentenyl pyrophosphate (IPP) by liquid-chromatography coupled to mass spectrometry (LC-MS).

[0350] Kinase 2, Conversion of IP to Isopentenyl Pyrophosphate (IPP)

[0351] Here, 50 mM NH4HCO₃ buffer at pH 7.5 was supplemented with 5 mM IP dilithium salt (Sigma-Aldrich), 15 mM ATP, 20 mM MgCl₂. The reactions were initiated by adding 20 vol-% (final) of the cleared cell lysate. The reactions were treated and analysed as described in the previous paragraph.

### Example 4

### In Vitro Cascade Reaction Kinase 1 and Kinase 2, Conversion of Isoprenol to IPP

[0352] To assess the potential of converting isoprenol to IPP with a combination of kinase 1 and kinase 2 a cascade reaction was carried out in vitro. In that regard, 50 mM NH₄HCO₃ buffer at pH 7.5 was supplemented with 5 mM isoprenol, 30 mM ATP, and 20 mM MgCl₂. Reactions were initiated by adding 20 vol-% of the cleared cell lysate of kinase 1 and kinase 2 protein production (40 vol-% total). The reactions were treated and analysed as described above. LC-MS quantification indicated successful synthesis of IPP and/or DMAPP

### Example 5

### In Vivo Cascade Reaction Kinase 1 and Kinase 2, Conversion of Isoprenol to IPP

[0353] Genes of kinases identified as hits in the in vitro screenings were recloned (BioCat GmbH) into the commercially available pCDFDuet1-plasmid system (Novagen) following the logic pCDFDuet1_Kinase2_Kinasel (e.g. SEQ ID NO 486). Resulting plasmids were used to transform E. coli BL21-Gold(DE3) (Agilent). A single colony of the transformants was transferred into a 12 ml reaction tube containing 4 ml LB medium supplemented with 100 pg/ml spectinomycin dihydrochloride (Sigma Aldrich) and incubated overnight at 37° C. at an agitation of 200 rpm. The overnight culture was used to inoculate 100 ml Neidhardt supplemented medium (Clomburg, J. M. et al., Proc Natl Acad Sci USA, 2019, 116(26)), 12810 containing 100 μg/ml spectinomycin dihydrochloride filled into a 500 ml baffled Erlenmeyer flask to a final optical density at 600 nm (0D600) of 0.1. Subsequently, the culture was incubated at 37° C. and 200 rpm for 3 hours before the temperature was lowered to 30° C. and gene expression was induced by the addition of 1 mM IPTG. Isoprenol was added at a final concentration of 26.9 mM and 5 ml samples were taken after 0 (prior to isoprenol addition), 1, 2.5, 5, 22, and 28 hours of incubation. The OD600 of the samples was measured and they were directly further processed by fast filtration (Castano-Cerezo, S. et al., Metabolomics, 2019, 15, 115). In brief, the sample was filtered under reduced pressure through a 0.45 μm polyamide filter membrane (Sartorius) with a diameter of 5 cm fitted on a 1 l filter apparatus (Sartorius). The filter cake and filter were transferred to a 15 ml conical tube and immediately frozen in liquid nitrogen. The filters were stored at −80° C. until being further processed. In that regard, the filter was submerged in a 1:1 mixture of isopropanol and a 50 mM aqueous NH₄HCO₃ solution at pH 7.5 prewarmed to 70° C. The suspension was subsequently incubated for 20 min at 70° C. and an agitation of 1000 rpm on a Thermomixer before being placed on ice and sonicated for 3 min (Branson Sonifier 250, 70%, Output 7). All debris was removed by centrifugation at 4° C. and 1 ml of the resulting supernatant transferred to a fresh 1.5 ml reaction tube. All of the solvent was completely removed from the sample using a SpeedVac vacuum concentrator (Thermo Fisher, Savant, SPD131DDA) at 45° C. overnight. The residue was taken up in 200 μl 1:1 mixture of methanol and 50 mM aqueous NH₄HCO₃ solution at pH 7.5. IP/DMAP and IPP/DMAPP were quantified via liquid chromatography coupled to mass spectrometry. Reported results of IP/DMAP and IPP/DMAPP concentrations are normalized to the respective OD600 of the sample. A culture in which gene expression was not induced and no isoprenol was added served as a negative control. Reported values show the average of three independent measurements

### Example 6

### LC-MS Quantification

[0354] In Vitro Assay

[0355] Reactants were quantified on an ultra-high-pressure liquid chromatography (UPLC) system (Vanquish, Thermo-Fisher) coupled to a single-quadrupole mass spectrometer with electron spray ionization (ISQ-EC, Thermo-Fisher). The UPLC system was run in ion pairing chromatography mode. It was equipped with a peptide C-18 column (Waters, ACQUITY peptide BEH, pore size 130 Å, particle size 1.7 μm, inner diameter×length 2.1×50 mm) that was eluted under isocratic conditions with 25 vol-% eluent A (buffer containing 10 mM tributylamine and 15 mM acetic acid) and 75 vol-% eluent B (acetonitrile). The method was run with a flow of 0.5 ml/min for 2.5 min and the column was heated to 40° C. Analytes were detected and quantified via mass spectrometry. In that regard, the instrument was set to negative ionization mode, collision-induced dissociation voltage was set to 40 V, the vaporizer temperature was 282° C. and the temperature of the ion transfer tube 300° C. The sweep, sheath, and aux gas pressures were set to 0.5 psig, 49.9 psig, and 57 psig, respectively. IP eluted at 0.6 min and its appearance could be followed at a mass-to-charge ratio (m/z) 165, while IPP eluted at 1.3 min and its appearance could be followed at m/z 245. The quantification was based on standard curves prepared by analysis of authentic standards of IP dilithium salt and IPP triammonium salt (Sigma-Aldrich). Reaction yields are reported relative to the amount of the respective substrate used in the reaction.

[0356] In Vivo Assay

[0357] All measurements were performed on a Thermo Vanquish Flex UHPLC system using an Acquity PREMIER BEH C18, 50×2.1 mm, 1.7 μm dp column (Waters, Germany). Separation of 2.5 μL sample was achieved by a multistep gradient from (A) 10 mM AmFo (Ammonium formate)+10 mM DBA (Dibutylamine) in H₂O to (B) 10 mM AmFo+10 mM DBA in H₂O/ACN (1:9) at a flow rate of 600 pl/min and 45° C. The gradient was initiated by a 0.5 min isocratic step at 2% B, followed by an increase to 60% B in 5.5 min, followed by an increase to 100% B in 0.5 min to end up with a 1 min step at 100% B before reequilibration at initial conditions. UV spectra were recorded by a DAD (Diode Array Detector) in the range from 200 to 600 nm. The LC flow was split to approx. 75 μL/min before entering the maXis II hr-ToF mass spectrometer (Bruker Daltonics, Germany) using the Apollo ESI source in negative mode. In the source region, the temperature was set to 200° C., the capillary voltage was 3200 V, the dry-gas flow was 5.0 L/min and the nebulizer was set to 1.0 bar. To transfer the generated ions funnel 1 RF was set to 400 Vpp and the multipole RF to 350 Vpp. Then ions passed the quadrupole with a low cutoff at 110 m/z and an ion energy of 3.0 eV, forwarded to the collision cell which was operated in stepping mode (collision energy=8.0 eV, pre pulse storage=5.0 μs; collision RF=200-800 Vpp; transfer time=75-120 μs; timing=30-70%) before entering the ToF tube. Mass spectra were acquired in the focus mode ranging from 50-650 m/z at a 2.5 Hz scan rate. The quantification was based on standard curves prepared by analysis of authentic standards of IP dilithium salt and IPP triammonium salt.

The application's sequence listing, which the Patent Office published only in electronic form, follows.

SEQUENCE LISTING (491 sequences)

SEQ ID NO: 1 - protein, 582 aa, Saccharomyces cerevisiae
  CK1
MVQESRPGSVRSYSVGYQARSRSSSQRRHSLTRQRSSQRLIRTISIESDVSNITDDDDLRAVNEGVAGVQLDVSETANKGPRRASATDVTDSLGSTSSEYIEIPFVKETLDASLPSDYLKQDILNLIQSLKISKWYNNKKIQPVAQDMNLVKISGAMTNAIFKVEYPKLPSLLLRIYGPNIDNIIDREYELQILARLSLKNIGPSLYGCFVNGRFEQFLENSKTLTKDDIRNWKNSQRIARRMKELHVGVPLLSSERKNGSACWQKINQWLRTIEKVDQWVGDPKNIENSLLCENWSKFMDIVDRYHKWLISQEQGIEQVNKNLIFCHNDAQYGNLLFTAPVMNTPSLYTAPSSTSLTSQSSSLFPSSSNVIVDDIINPPKQEQSQDSKLVVIDFEYAGANPAAYDLANHLSEWMYDYNNAKAPHQCHADRYPDKEQVLNFLYSYVSHLRGGAKEPIDEEVQRLYKSIIQWRPTVQLFWSLWAILQSGKLEKKEASTAITREEIGPNGKKYIIKTEPESPEEDFVENDDEPEAGVSIDTFDYMAYGRDKIAVFWGDLIGLGIITEEECKNFSSFKFLDTSYL

SEQ ID NO: 2 - DNA, 1749 bp, Saccharomyces cerevisiae
  CK1 wild type
atggtacaagaatcacgtccagggagtgtaagaagttactcggtcggttaccaagcaaggtccagatcgagttctcaaagaagacattcgttaacacgccaacgttcctcgcaaagactgattagaaccatcagtatcgagtctgatgtgtctaatattactgacgatgacgatttgagagctgtcaatgagggagtagcgggtgtgcaactggacgtctctgaaaccgcaaataagggaccaagaagagcatcagcaactgatgtcacagatagtttgggttcgacttcgtcggaatatattgagattccctttgttaaggaaacattggatgcaagtttaccttcggattatctgaagcaggacatattaaatctcattcagagtttgaagatatccaaatggtataacaacaagaaaatccaaccggtagcacaagatatgaacttagtcaagatctctggtgcgatgacaaacgcaattttcaaagttgaataccctaagttaccatcgttgctattgagaatatacggaccgaatattgataatatcattgacagggaatatgaattgcagattttggctaggctttcattgaaaaatataggtccttccctttacggctgttttgtaaacggtagatttgagcagtttctggagaattctaagactttaacaaaagacgacattagaaactggaagaactctcaaaggattgcaaggagaatgaaggagttacatgtaggtgttcctctcttgagttcagaaaggaagaacgggtcggcttgttggcaaaagattaaccagtggttgcgcacgattgagaaagtcgaccaatgggtgggggatcctaaaaacattgaaaactctttattatgtgagaattggtccaagtttatggatattgtcgatagatatcacaagtggcttatttctcaagaacagggtatagagcaagtcaacaaaaatcttatattctgccataatgatgcccaatacggcaatttacttttcactgctcctgtgatgaacacaccgagcctatacactgcaccttcgtctacatcattgacttcccaatcaagttccttatttccttcgagctccaatgtcattgtagatgatataatcaacccgccaaagcaggagcaaagccaagattccaaattggtcgtcattgattttgaatatgcaggtgccaatcccgccgcatatgatttagcgaatcatctttccgagtggatgtatgattacaacaatgctaaggccccacatcagtgccacgctgatagatatcccgataaagaacaggttttgaatttcttatactcttatgtttcgcatctaaggggtggtgctaaggaacccatagatgaagaggttcaaagactctataagtcaatcattcaatggagacccactgtacaactattttggtcgctctgggccatcctacaaagtggtaaattagagaaaaaagaagcctccactgccatcactagagaagaaattggacccaatggaaaaaaatatatcatcaagactgaacccgaatcccctgaagaagactttgttgaaaatgacgacgagcctgaagctggcgtcagcattgacacgttcgattatatggcttatggtcgtgacaagattgcggtcttttggggcgacctcattggcttaggcataatcaccgaagaagaatgcaaaaatttcagctctttcaagttcctcgatactagttatttgtaa

SEQ ID NO: 3 - DNA, 1749 bp, Artificial Sequence
  CK1 codon optimised
atggttcaggaaagtcgtccgggcagtgtgcgtagctatagtgttggttatcaggcccgcagtcgcagcagtagtcagcgtcgtcatagcctgacccgccagcgcagtagccagcgtctgattcgcaccattagtattgaaagtgatgtgagcaatatcaccgatgatgatgatctgcgtgccgttaatgaaggcgttgccggcgtgcagctggatgttagtgaaaccgccaataaaggtccgcgccgcgccagcgccaccgatgtgaccgatagcctgggcagtaccagtagtgaatatattgaaattccgttcgtgaaagaaaccttagatgcaagcctgccgagcgattatctgaaacaggatattctgaatctgattcagagtctgaaaattagtaagtggtataataacaagaagatccagccggtggcccaggatatgaatctggtgaaaattagcggcgccatgaccaatgccatcttcaaagtggaatatccgaaactgccgagtctgctgctgcgcatctatggtccgaatattgataatattatcgaccgcgaatacgaactgcaaattctggcacgcctgagcctgaaaaatattggtccgagcctgtatggttgcttcgttaatggtcgcttcgaacagttcctggaaaatagcaaaaccttaaccaaagatgatattcgcaattggaaaaatagccagcgtattgcacgtcgcatgaaagaactgcatgttggcgttccgctgctgagtagtgaacgtaaaaatggcagtgcatgttggcagaaaattaatcagtggctgcgcaccattgaaaaagttgatcagtgggttggcgatccgaaaaatattgaaaatagtctgctgtgcgaaaattggagcaaattcatggatattgttgatcgctatcataaatggctgattagtcaggaacagggcattgaacaggttaataaaaatctgatcttctgccataacgatgcacagtatggtaatctgctgttcaccgccccggttatgaataccccgagcctgtacaccgcaccgagtagcaccagcctgaccagtcagagtagcagtctgttcccgagcagtagtaatgtgattgtggatgatattatcaacccgccgaaacaggaacagagccaggatagtaaactggttgttattgacttcgaatatgccggtgccaatccggccgcctatgatctggccaatcatctgagcgaatggatgtatgattataataatgcaaaggccccgcatcagtgccatgcagatcgttatccggataaagaacaggttctgaacttcctgtatagttatgttagtcatctgcgtggcggtgccaaagaaccgattgatgaagaagtgcagcgtctgtataaaagtattattcagtggcgtccgaccgtgcagctgttctggagcctgtgggcaattctgcaaagtggtaaactggaaaaaaaagaagcaagtaccgcaattacccgcgaagaaattggcccgaatggtaaaaaatatattatcaaaaccgagccggaaagtccggaagaagacttcgttgaaaatgatgatgaaccggaagcaggtgtgagtattgataccttcgattatatggcctatggtcgcgataaaattgcagtgttctggggtgatctgattggcctgggcattattaccgaagaagaatgtaaaaacttcagtagcttcaaattcctggataccagctatctgtga

SEQ ID NO: 4 - protein, 383 aa, Galerina marginata
  CK2
MKESWHYKKSPFCLQLLEILRKLHVRVWSTAQISPEDVIIHKVSGALTNAVFFVSCPTVPSARTLLLRVYGSSSGSLISRPRELHTLHVLSSQYKIGPRVYGTFDNGRIEEYFDSVTLTAADIRDPITSQWIGARMADLHSVDIDVVYEAGSLPLNENRGFEIAANVSSWLDPAEQVLNLPAVSEATSRELDLPRFKKEWARYLCWSLNRPHSFGTRRVFAHNDAQYGNLLRLKDGSEGVDEHRQIIVVDFEYAAPNPAAFDIANHFHEWTANYHCPTPHVLIPSRYPTFEERRNFYTSYIRHAAMLAEDPGLSDADLDKMITELDRDVLIWGAASHAGWAIWGIIQAREDLEAAVTELEFDYIGYAKGRMTAFRKDLQEFGI

SEQ ID NO: 5 - DNA, 1152 bp, Galerina marginata
  CK2 wild type
atgaaggaatcatggcactataagaaatcacctttttgcctccaacttcttgaaatcttacggaagttgcacgttcgtgtgtggtctactgcacaaatctccccagaagacgtcataatccacaaggtttccggagctctcaccaatgctgtctttttcgtgtcatgcccaaccgtcccgtccgcccgtacgctgttactacgcgtgtatggttcttcctccggatctctcatttctcgaccacgggaactacacaccctgcacgtcctttcgtcacagtacaagatcggtcctcgagtttacgggacttttgataacgggagaattgaggagtatttcgactccgtgaccttgactgcggccgacattcgcgatccgattaccagtcaatggattggagcacgaatggcagaccttcattctgtcgatatagacgttgtctatgaagccggttcgcttccactgaatgaaaatcgtggttttgaaattgctgccaatgtttcttcttggttagatccagccgaacaagttctcaatttacctgctgtgtctgaagccacgtcacgagagttggacctgcctaggttcaagaaagaatgggcacggtacctatgttggtcattaaatcgaccgcattcatttggcactagacgggtcttcgctcacaatgatgctcaatacgggaatttattgagactcaaagacggcagtgagggtgtggatgagcatcgccagatcatcgtcgtcgattttgagtacgctgcccccaatccagcagcattcgacattgccaatcacttccacgagtggacggcaaattatcattgcccgaccccacatgtcctcatcccatcacgttatcctacatttgaagagcgtcgcaatttttacacttcctacatccgacatgcggcaatgttggcagaagatcctggattgagcgatgcggacctcgacaaaatgatcacagaattggatagggatgttcttatctggggcgccgcctcgcatgctggctgggccatctggggcatcatccaagcgagggaagacttggaggcagctgtcacggagctggagttcgattatatcggttacgcaaaaggtcgaatgacagctttccgcaaggatttacaagaatttggcatttaa

SEQ ID NO: 6 - DNA, 1152 bp, Artificial Sequence
  CK2 codon optimised
atgaaggaaagttggcattataagaagagtccgttctgtctgcaactgctggaaattctgcgtaaactgcatgttcgcgtgtggagcaccgcccagattagcccggaagatgtgattattcataaagttagtggtgcactgaccaatgcagtgttcttcgtgagttgtccgaccgtgccgagcgcacgcaccctgttactgcgtgtgtatggcagtagcagtggtagcctgattagtcgtccgcgtgaactgcataccctgcatgtgctgagtagccagtataaaattggcccgcgcgtgtatggcaccttcgataatggccgtattgaagaatacttcgatagcgtgaccctgaccgcagccgatattcgcgatccgattaccagccagtggattggcgcccgcatggcagatctgcatagcgttgatattgatgttgtgtatgaagcaggcagcctgccgctgaatgaaaatcgtggcttcgaaattgcagcaaatgtgagtagttggctggaccctgccgaacaggtgctgaatctgccggcagttagcgaagcaaccagtcgcgaactggatctgccgcgcttcaaaaaagaatgggcccgctatctgtgttggagcctgaatcgtccgcatagcttcggtacccgccgcgtgttcgcccataatgatgcccagtatggtaatctgctgcgcctgaaagatggtagtgaaggtgtggatgaacatcgtcagattattgttgtggacttcgaatatgcagcaccgaatccggccgcattcgatattgcaaatcacttccatgaatggaccgcaaattatcattgtccgaccccgcatgttctgattccgagccgttatccgaccttcgaagaacgccgtaacttctataccagttatattcgccatgccgccatgctggccgaagatccgggtctgagcgatgccgatctggataaaatgattaccgaactggatcgtgatgttctgatctggggcgcagcaagccatgcaggctgggcaatctggggtattattcaggcacgcgaagatctggaagccgccgtgaccgaactggagttcgattatattggctatgcaaaaggtcgcatgaccgcattccgtaaagatctgcaagagttcggtatttga

SEQ ID NO: 7 - protein, 354 aa, Piromyces finnis
  CK3
MSTAVEEEYFKNKIASIEKFDFTLNTESQETIFEGIKIILKHFLPEWNDLKFTPQTDGITNTLILVSCPQGKVIVRVFGNGTEYIINRNAEQKNFIFLSDNKLAAPIIGNFNNGFVHGYVEGSVFSVPDMSDPQKSLLVAKKIGKWHSLNFPFEKKSSVYDVINKWIDEAPEVFEDKRKNEIYYSKDYLRKENLRNEINFLKEKLDEISSPLAFCHCDLLYGNIILHKDENGNDDVTFIDYEYGSINPRGFDIGNHFNEYAGFDCDYNLYPSKEFQYKWLKVYLQSYLGKENISEKEIEDLYREVNKYALLSHYYWGVWAILQAKYSQIDFDYISYSILRLDEYYNQKERFLSL

SEQ ID NO: 8 - DNA, 1065 bp, Piromyces finnis
  CK3 wild type
atgtcaacagctgtcgaagaagaatattttaaaaataaaattgcttctatagagaaatttgattttactttaaatacagaaagtcaagaaactattttcgaaggaattaaaattattttaaaacattttttacctgaatggaatgatttaaagtttactccacaaactgatggtattacaaatacacttattttagtatcatgtcctcaaggaaaagttattgtaagagtatttggtaatggtactgaatacattattaatagaaatgctgaacaaaagaattttatatttttatccgataataaactcgctgctccaattattggaaatttcaacaatggctttgttcatggatatgttgaaggaagtgtattttctgttccagacatgtcagatccacaaaagtctttattagttgcaaaaaaaattggaaaatggcatagtttaaatttcccatttgaaaagaagagctctgtttatgatgttattaataagtggattgatgaagctccagaagtttttgaagataaaagaaagaatgaaatatattattctaaggactatttaagaaaagaaaatttaagaaatgaaatcaactttttaaaggaaaaacttgatgaaatttcatctccattagctttttgtcattgtgatcttctttatggaaatatcattttacataaggatgaaaatggaaatgatgatgtaacctttattgattatgaatatggttcaattaatccaagaggatttgacattggaaatcattttaatgaatatgctggctttgattgtgactataatttatatccatcaaaagaatttcaatataaatggttaaaggtttatttacaaagttacttaggtaaagaaaatattagtgaaaaggaaatagaagatttatatcgtgaagttaataaatatgccttattatcacattattattggggtgtctgggccattcttcaagcaaagtactctcaaattgattttgattatattagttattctattctaaggcttgatgaatactacaatcaaaaagaaagatttttaagtctttaa

SEQ ID NO: 9 - DNA, 1065 bp, Artificial Sequence
  CK3 codon optimised
atgagtaccgcagtggaagaagaatacttcaaaaataaaatcgcgagcattgaaaagttcgacttcaccctgaataccgaaagtcaggaaaccatcttcgaaggcattaaaattattctgaagcacttcctgccggaatggaatgatctgaaattcaccccgcagaccgatggtattaccaataccctgattctggttagctgcccgcagggtaaagttattgttcgtgtgttcggtaatggtaccgaatatattattaaccgtaacgcagaacagaaaaacttcatcttcctgagtgataataagctggccgccccgattattggtaacttcaataatggcttcgttcatggctatgtggaaggcagcgtgttcagcgtgccggatatgagtgatccgcagaaaagtctgctggtggccaaaaaaattggcaaatggcatagcctgaacttcccgttcgaaaaaaaaagcagcgtgtatgatgtgattaataaatggattgacgaggcaccggaagtgttcgaagataaacgtaaaaatgaaatctactacagcaaggattacctgcgtaaagaaaatctgcgtaatgaaattaacttcctgaaagaaaagctggatgaaattagcagtccgctggccttctgtcattgtgatctgctgtatggtaatattattctgcataaagacgagaatggcaatgatgatgtgaccttcattgattatgaatatggcagtattaacccgcgtggcttcgatattggtaatcacttcaatgaatacgcaggcttcgattgtgattataatctgtatccgagcaaagagttccagtataaatggctgaaagtgtatctgcaaagctatctgggcaaagaaaatattagcgaaaaagaaatcgaggatctgtatcgcgaagtgaataaatatgcactgctgagccattattattggggtgtgtgggccattctgcaagccaaatatagccagattgacttcgattatatcagctatagcattctgcgcctggatgaatattataatcagaaagaacgcttcctgagcctgtga

SEQ ID NO: 10 - protein, 537 aa, Babjeviella inositovora
  CK4
MDTLATEKPRSRSRSMSRSRSRSNIRPVLTPLLSSNQVKQVPRRRSHSRRPSLSRQSSGSVDEVPHIKANLDNSLPLDFMKEEIMIIVKALRIKHWHKLPESAASRIKVNRISGALTNSIYKLNLDECPALLLRVYGKNVDEIIDREAELIILKRLSSKRIGPRLLGTFTNGRFEQFLDGFITLNKDQLRNKYISQMIAKRMKELHVNMELEAKDTHPMSWALIDKWFPLAEEVVKSYEANPDVSEADFLLTNFATFKKNVQAYRTWLMNKYGKAEFPREVLCFCHNDTQYGNLLLHSSLLEDSKTEVAKVIEKMESLSLDFDSDKLAAASHSNLVVIDLEYSGPNCPPFEFANHFSEWMADYLDATNSHYLDERKYPTTEEQLNFFRVYTEFSGRATDPADSTRPDEAATKKLFNETIWWRGTVSVYWCLWGIVQNGPWKPTPTPEAATGEGFLGTYKFSTETEEGDDQGAEVEITESSDDAFSYIRYSQQKAAMFYGDAVQLGIVDRDAICERYLTQGEGADEGHVKFLSVKELD

SEQ ID NO: 11 - DNA, 1614 bp, Babjeviella inositovora
  CK4 wild type
atggacaccttagctaccgagaaaccgagatcccgctctcggtcgatgtcccgctctagatcacggtccaacatcagaccggttttgacccccctgctttcctccaaccaggtgaaacaagtccccagacgccgttcgcactcgagaagaccctcgttaagcagacagagctcggggagcgtcgatgaagtgccgcacattaaggctaacttggacaacagcttgccattggacttcatgaaggaggagatcatgatcattgtcaaggcgttgcgtatcaagcactggcacaagctcccggaatctgctgcgtcgcgcatcaaggtgaaccgaatcagcggtgccttgaccaactcgatttacaagttgaatcttgacgagtgtccggcgttgctcttgcgcgtgtatgggaagaacgtcgatgagatcatcgacagagaggcggagcttatcattttaaagaggctctcgagtaagcggattggcccgcgtctcttgggaaccttcactaatgggcggtttgagcagtttttggacgggttcatcaccttgaacaaggaccagctccgtaacaagtacatctcgcagatgattgccaagcgcatgaaggagttgcatgtcaacatggagttggaggccaaggacacgcatcccatgtcttgggcgttgattgacaagtggtttccgctcgcggaggaggtagtgaaatcttatgaagccaacccagacgtttccgaagccgactttctcctcacaaattttgccacctttaagaagaatgtgcaagcgtacagaacctggttgatgaacaagtacggcaaggctgagtttccacgggaggtcttgtgcttctgccacaacgacacccagtacggaaacttgcttttgcatagcagcttgttggaggactccaagactgaggttgctaaggtgatcgaaaagatggaatcactttcgcttgactttgattcggataagcttgccgcagcctcgcattccaacttggtggtcattgatttagagtactctggccctaactgtccgcctttcgaattcgccaaccatttcagcgaatggatggccgattaccttgatgccactaactcccactacttggacgaaaggaagtacccaaccaccgaagagcagttgaactttttccgtgtctataccgagttttccggccgtgccaccgatcctgccgactccaccaggccagatgaagcagccacgaaaaagttgtttaacgaaaccatctggtggaggggtaccgtttctgtctattggtgcttgtgggggattgtccagaatgggccgtggaagcctacgcccacgccagaggcagccaccggcgagggattcctggggacttacaagtttagtaccgaaacggaggaaggagatgaccaaggagccgaggtggagattaccgagtcttcagacgatgcgttcagttatatccgatactctcaacagaaggcggccatgttctacggagacgctgttcagcttgggattgttgatagagacgcaatctgcgagagatacttgacgcaaggcgaaggggctgatgaaggacatgttaagttcttgtctgtcaaggaattagactaa

SEQ ID NO: 12 - DNA, 1614 bp, Artificial Sequence
  CK4 codon optimised
atggataccctggccaccgaaaaaccgcgtagccgtagccgcagcatgagccgtagccgtagtcgcagtaatattcgcccggttctgaccccgctgctgagcagtaatcaggttaaacaggtgccgcgccgtcgcagccatagccgtcgtcctagtctgagtcgtcagagtagcggtagtgtggatgaagttccgcatattaaagccaatctggataatagtctgccgctggacttcatgaaagaagaaattatgattatcgtgaaggcactgcgcattaaacattggcataaactgccggaaagcgccgcaagccgtattaaagtgaatcgcattagtggtgcactgaccaatagtatctataaactgaatctggatgagtgcccggccctgctgctgcgtgtgtatggcaaaaatgttgatgaaattatcgaccgtgaagcagaactgattattctgaaacgcctgagcagtaaacgcattggtccgcgtctgctgggtaccttcaccaatggtcgcttcgaacagttcctggatggcttcattaccctgaataaagatcagctgcgcaataaatatatcagccagatgattgccaaacgtatgaaagaactgcatgtgaatatggaactggaagccaaagatacccatccgatgagctgggccctgattgataaatggttcccgctggccgaagaagttgtgaaaagctatgaagcaaatccggatgtgagtgaagccgacttcctgctgaccaacttcgccaccttcaaaaaaaatgttcaggcatatcgtacctggctgatgaataaatatggtaaagcagagttcccgcgcgaagttctgtgcttctgtcataatgatacccagtatggcaatctgctgctgcatagcagtctgctggaagatagcaaaaccgaagtggccaaagtgattgaaaaaatggaaagtctgagcctggacttcgatagcgataaactggccgcagccagccatagtaatctggtggttattgatctggaatatagtggcccgaattgtccgccgttcgagttcgccaatcacttcagcgaatggatggcagattatctggatgcaaccaatagccattatctggatgaacgtaaatatccgaccaccgaagaacagctgaacttcttccgcgtgtataccgagttcagtggtcgtgccaccgatccggccgatagcacccgtccggatgaagccgccaccaaaaaactgttcaatgaaaccatctggtggcgcggcaccgttagtgtgtattggtgcctgtggggcattgttcagaatggcccgtggaaaccgaccccgaccccggaagccgcaaccggtgaaggcttcctgggtacctataaattcagtaccgaaaccgaagaaggcgatgatcagggtgccgaagtggaaattaccgaaagtagtgatgatgccttcagctatattcgttatagccagcagaaagccgccatgttctatggtgatgccgtgcagctgggtattgtggatcgtgatgcaatctgtgaacgttatctgacccagggcgaaggcgcagatgaaggtcatgttaaattcctgagtgtgaaagaactggattga

SEQ ID NO: 13 - protein, 405 aa, Kazachstania naganishii
  CK5
MKRLHVTIPLDAPDNLVSLLTDDCQNYEIVKLKGALTNVIYKLSIRDSSGTSTSYLVRIFGAKLESLVDRVEEFNNITRVPPVVGYVNVLYVFDNGRVEYFLEGFKSVSAKQMVQQNVYRVLAQKFKALHCLVSITDKEIAHHRDGMCWYKLGQWIEIIENINGGEWIDSRDHQNVTEILLCRDWATFKKTVLNYKNWLLEEDAESFQQMKFCHNDAQQGNILLDSKTKDDDIPNLNLIDYEYSGVNAIQFDLANFLTECMHDYEIDESYKCHGEQYPSKEKVLDFLYHYSTHLHHGDSKGEASIVKLYNSVLKWRAASQLFWSVWAILQSGQLEAASAKIEAHVPDKGSNRVTSSDDPNEEVFDYMGFCNEKLSYFWGDMIKFNLASKEDCIVSKVRYLDTEFI

SEQ ID NO: 14 - DNA, 1218 bp, Kazachstania naganishii
  CK5 wild type
atgaagagattgcatgtcacaataccgctagatgctccagataatctggtatcactcctgactgatgattgtcaaaattatgaaattgtcaagctgaaaggtgcattgactaatgtcatttacaagttgtcgatccgggattcttctgggacttctacaagctacctagttcggatatttggagcaaaattggaatcgcttgttgatagagttgaagagtttaataacataacgagagtacctccagtggttggatatgtaaatgtgctttacgtttttgacaacggaagagtggaatacttcttagaagggttcaaaagtgtgtctgctaagcaaatggtgcagcaaaatgtataccgagttcttgctcaaaaatttaaagcgttacactgtttggtttcgattacagataaggaaattgctcaccatcgtgacggtatgtgttggtataaattgggccaatggattgagatcattgagaatataaatggaggagaatggatagacagtagggatcaccagaacgtgactgagattttgctatgtagagattgggctacattcaaaaagacggtactaaattataaaaactggcttttggaagaagatgccgaaagtttccagcaaatgaaattttgccataacgatgctcaacaggggaatatcctgttggattcaaaaacgaaggatgatgatattccaaatcttaatctgatcgattacgagtattccggggtcaacgctatccagtttgatcttgcaaattttttgactgaatgcatgcatgactatgaaattgacgaatcttataagtgccatggtgaacagtatccaagtaaagaaaaagttttggactttttataccactactcgacacacttgcatcacggtgattccaagggagaagcttctattgtcaaactgtacaactctgttttgaaatggagagctgcatctcagttgttctggtcggtatgggccatactacagagcggtcaactggaggcagcatcagcaaaaattgaggcgcacgtcccagataagggaagcaatagagtgacctcctctgatgatcccaacgaagaggtgtttgattacatggggttctgtaatgaaaaattgtcttacttctggggggatatgataaaattcaacctagctagtaaggaagattgcattgtttcaaaagttagatatctggatacagagttcatatag

SEQ ID NO: 15 - DNA, 1218 bp, Artificial Sequence
  CK5 codon optimised
atgaagcgtctgcatgttaccattccgctggatgccccggataatctggttagcctgctgaccgatgattgtcagaattatgaaattgttaagctgaagggcgccctgaccaatgttatctataaactgagtattcgcgatagcagtggtaccagtaccagttatctggttcgtatcttcggcgccaaactggaaagtctggtggatcgtgttgaagagttcaataatattacccgtgttccgccggttgtgggttatgttaatgttctgtatgtgttcgataacggtcgcgttgaatacttcctggaaggcttcaaaagcgtgagtgcaaaacagatggtgcagcagaatgtgtatcgcgttctggcccagaaattcaaagccctgcattgcctggtgagcattaccgataaagaaattgcacatcatcgcgatggtatgtgttggtataaactgggccagtggattgaaattattgaaaatattaacggtggtgagtggattgatagccgtgatcatcagaatgtgaccgaaattctgctgtgccgtgattgggccaccttcaaaaaaaccgtgctgaattataaaaactggctgctggaagaagatgccgaatcattccagcagatgaaattctgccataatgatgcacagcagggcaatattctgctggatagcaaaaccaaagatgatgatattccgaatctgaatctgattgattatgaatatagcggtgttaatgccattcagttcgatctggcaaacttcctgaccgaatgtatgcatgattatgaaattgatgagagttacaagtgccacggtgaacagtatccgagtaaagaaaaagtgctggacttcctgtatcattatagcacccatctgcatcatggcgatagtaaaggtgaagccagtattgtgaaactgtataatagcgttctgaaatggcgtgcagccagccagctgttctggagcgtgtgggcaattctgcaaagcggccagctggaagccgcaagtgccaaaattgaagcccatgttccggataaaggtagcaatcgcgtgaccagtagtgatgatccgaatgaagaagtgttcgattatatgggcttctgtaatgaaaaactgagctacttctggggtgatatgattaaattcaatctggccagcaaagaagattgcattgtgagcaaagttcgctatctggataccgagttcatttga

SEQ ID NO: 16 - protein, 1181 aa, Umbilicaria pustulata
  CK6
MSLHPASSWEAPMMMLKEGALPPHSSHPSFGHLILLVFEAVLEVVCVSLPGYIVARQGLFSTEMQKFVANLNVMLFTPCLIFTKLASQLSAEKLGELAVIPVIFIVQTLVSYLCSIGMSRLLGLQKRPRNFVVAMGVFGNSNSLPISLVISLSQTLKGLHWDKVPGDNDDEVAARGILYLMIFQQLGQLVRWSWGYHVLLAAPEKYKVEDHYTDSQLEQGQSIYRDDPDSEDEALLRNPLTESDRDSIDVSKDSSDTNVEGRDPNSASATGSQTGFEIGSGRQTPVTHQQYASSVSSRQLENAGPTESEPSSGLLPTPTNGNVKPHSSEVDYTGSVHEMHSPTAPHDEHVPAGLWGLPVRAMLAVKRGVQQMSVTVSTFSRSIYETLPESVQSIMMKIYMGLRRFVLGIWEFMNPPLWAMLAAIIVASVPSLQHLFFSEGTFIRNSVTRAISQSGGVAVPLILVVLGANLARNTLPEDPHHSVEDDRIEKKLLIASLVSRMLLPIIVMAPLLAVTAKYVPVSILDDPIFVIVCFLLTGAPSALQLAQICQINGVYMGAMSKLLFQSYVVWILPSTLILVMETNLSRRASSIRKLRKGSTAAGSSDTEYHEGDALVPTAEVFLDNSKTLSYFGGTAESEPDLSNSSKRAAKEGWLIFKNEILRLTHTLRLKGWRMLPLERGGDIDVERLSGALTNAVYVVSPPKDLEQTPSDKDGGTAPLAPKKPPPKLLLRIYGPQVEHLIDRENELQILRRLARKKIGPRLLGTFVNGRFEEFFHARTLTAHDLRVPATSKQIAKRMRELHEGIELLEEERAAGPFVWRNWDKWVDRCEEVISWLDNQILSGNQSSARTPTEMWKQRGLICGVEWSVFRETVNRYRAWLDKQYGGRDALRQQLVFAHNDTQYGNLLRLEPSGESPLLLPVNEHKQLIVIDFEYASANLPGLEFANHFTEWCYNYHDAEKPYSLTEANYPTKDEQRTFLKAYVQHRPQFHARASATFATAPGPGPSSSISSFMLDSRAPPAQLVEEEKERDEATEREVKRLMREAHLWRVANTAQWVAWGIVQAKVPGMDEALEDQKNPSPESERTARRGSSTSVTLFGSDPLDPDIAEDIHNRRPERLDADAMGGATEVPTKEEDTDEFDYLGYAHERAMFFWGDALSLGLVRKEDLPVDVLRKVKMVEY

SEQ ID NO: 17 - DNA, 3546 bp, Umbilicaria pustulata
  CK6 wild type
atgtccttacatccagcatcatcatgggaagcaccaatgatgatgctgaaggaaggcgcgctgcctccacactcctcacacccatccttcggccacctcatcctactcgtgtttgaagcagtgttggaggtagtatgtgtcagtcttcccggatatatcgtggcccggcagggcttgttcagtaccgagatgcagaaattcgttgccaatctgaacgtcatgctcttcacaccctgcctgatcttcacgaaactagcctcccagttgtcggcggaaaagctcggagaactggcagtcatcccagtcatctttatagtgcagactctggtatcatacctgtgttcaataggcatgtcgaggcttctgggattacagaagcggccacgaaacttcgtcgttgccatgggtgtttttggaaactcaaactctctcccgatctcattagtcatatctttgtcgcagactctcaagggcctgcactgggataaagtacctggtgacaacgacgacgaagtcgcagcccgaggcattctttacctcatgatcttccaacaactgggccaacttgtgaggtggagttggggttatcacgtgctactagcagcaccagagaagtacaaagtggaggatcattacacggattctcagctcgaacaagggcaaagtatatatcgggatgatccagatagtgaagacgaggctctgcttcgcaacccccttacagaaagcgaccgggattctatagacgtcagcaaggactctagcgacacgaacgtcgagggccgcgacccaaacagtgcgagcgcaacgggatcacagacaggcttcgagataggatccgggagacaaactcctgtgacgcaccagcagtatgcttcatctgtttcgtctcgacagcttgagaacgcaggaccgacggagtcagaaccatcatcaggactactaccaacgcctaccaatggtaatgtaaagcctcattctagtgaagtcgactacaccggctctgtgcacgagatgcatagccctaccgccccccacgacgaacatgtcccagctggattatggggcctaccagtgcgggcaatgctggccgtcaagcggggcgttcagcaaatgtcggtaacggtctctacgttctcacgaagcatatatgagactctaccagaatctgtacagagtatcatgatgaagatctatatgggccttcggagattcgtcctcggcatctgggagtttatgaatcccccactgtgggccatgctggcagcaatcattgtcgcctctgtcccctccctgcagcatctattcttcagcgaaggcacgttcatcaggaattccgtgacccgagccatctctcagagtgggggcgtcgcggtccctctcattctcgtcgtccttggagccaatttggcgaggaacactcttcctgaagatcctcatcactcggtcgaagatgacaggatagaaaagaaacttctcattgcttctctagttagccggatgctcctgccgatcatcgtgatggctcccctattagccgtcactgccaagtacgtgcccgtgagcatcttggatgaccctatcttcgtcatcgtctgcttcctcctcacgggcgcgcctagcgcgctacagttggcacaaatctgccagatcaatggagtatacatgggggctatgtcgaaactactcttccaaagctatgttgtgtggatcctcccatcaacactcatccttgtcatggagactaatttgtctcggcgggcgtcatcgattcgaaagctgaggaagggttcaacagctgccggatcttcggacacggagtatcatgagggcgatgcccttgtcccgacggccgaagtgttcctagataactcgaagacactaagttacttcggtggcaccgccgagtcagaaccagatctcagcaattcgagtaagcgcgcggccaaagaagggtggctgatcttcaagaacgagatactgcgtttgacacacaccttgaggctgaaaggttggaggatgctaccactcgaacgtggcggagacattgatgtggaacggctcagtggggcactgacaaacgcagtttacgtggtgtcgccacccaaggatttagagcagaccccgtctgacaaagatggcggtacggcgccgctcgcacctaagaagccaccaccgaagcttctcctccgtatctatggcccccaggtggaacatctcatcgaccgggaaaacgagctgcaaatcctccgccgtctggctcgaaagaagattggcccgcgcttactaggcacctttgtcaacggtagatttgaagagtttttccatgcgcgcacacttaccgcgcatgacttgcgtgtacccgcgacttcaaagcagattgcaaagcgtatgcgtgaattacatgagggcattgagttacttgaggaggaaagagcagcgggcccatttgtctggagaaactgggataagtgggtggacaggtgtgaagaggtcatttcctggctcgacaaccagatcctttcgggtaaccaatcttccgcaagaactcccacagagatgtggaagcagcgtggcctaatctgcggtgtcgagtggtccgtttttcgagagacggtcaatcgatatcgcgcgtggcttgataaacaatatggcggcagggatgctctcaggcaacagctcgtgttcgcacataatgatacgcaatatggtaacctcctccgtctggaacctagcggagaatccccgctcctgctaccggtcaacgagcataagcaattaattgttatcgatttcgagtacgcatcggctaatcttcctggcctggagtttgccaaccactttactgaatggtgctacaactatcatgacgcagaaaagccctattccctcacagaagcgaactacccaacaaaggatgaacagcgcacatttttgaaagcttacgtccagcatcgtccccaattccacgcacgcgcttcggccacatttgccacagcgccgggtcctggtccgtcaagctcaatttcttctttcatgctcgacagtcgagctccaccagctcaactagtcgaagaggaaaaggagagggacgaggccaccgagcgagaagtaaagcgactgatgcgtgaggcacacctgtggagggtggccaacactgcgcaatgggttgcgtggggcattgtacaggccaaagtgcccgggatggatgaagcgcttgaagaccaaaagaacccctcccctgaatcggaacgtacagcaaggcgcggtagtagtacttcggtcacccttttcggctccgatccgctcgaccccgacattgccgaggatatccacaacagaagaccggaaaggctggacgccgacgccatgggtggcgcaactgaggtgcccaccaaggaagaggacaccgatgagtttgattatctgggctatgctcatgagcgggcgatgttcttctggggtgatgctctctctcttgggctcgtgaggaaggaggaccttccggtggacgttctgcggaaggtaaagatggttgagtattag

SEQ ID NO: 18 - DNA, 3546 bp, Artificial Sequence
  CK6 codon optimised
atgagtctgcatccggccagcagttgggaagcaccgatgatgatgctgaaagaaggcgcactgccgccgcatagcagtcatccgagttttggtcatctgattctgctggtttttgaagcagtgctggaagtggtttgtgttagcctgccgggttatattgttgcccgccagggtctgtttagtaccgaaatgcagaaatttgttgcaaatctgaatgtgatgctgtttaccccgtgcctgatttttaccaaactggccagccagctgagcgcagaaaaactgggcgaactggcagtgattccggttatttttattgtgcagaccctggttagctatctgtgtagcattggtatgagtcgtctgctgggcctgcaaaaacgcccgcgcaattttgttgttgcaatgggtgtttttggtaatagtaatagcctgccgattagcctggttattagtctgagtcagaccctgaaaggcctgcattgggataaagttccgggcgataatgatgatgaagttgcagcacgtggcattctgtatctgatgatttttcagcagctgggtcagctggttcgttggagttggggctatcatgttctgctggcagcaccggaaaaatataaagtggaagatcattataccgacagccagctggaacagggtcagagcatctatcgcgatgatccggatagtgaagatgaagcactgctgcgcaatccgctgaccgaaagcgatcgcgatagtattgatgtgagcaaagatagcagcgataccaatgttgaaggccgcgatccgaatagcgcaagtgcaaccggtagtcagaccggttttgaaattggcagcggtcgtcagaccccggttacccatcagcagtatgccagcagcgttagcagtcgtcagctggaaaatgccggtccgaccgaaagtgaaccgagtagtggcctgctgccgaccccgaccaatggcaatgtgaaaccgcatagctcagaagttgattataccggtagcgtgcatgaaatgcatagtccgaccgccccgcatgatgaacatgtgccggcaggtctgtggggcctgccggttcgtgcaatgctggccgtgaaacgtggtgtgcagcagatgagcgtgaccgtgagtacctttagccgcagtatctatgaaaccctgccggaaagtgttcagagcattatgatgaaaatctatatgggtctgcgccgctttgttctgggtatttgggagtttatgaatccgccgctgtgggcaatgctggcagccattattgtggcaagtgtgccgagcctgcaacatctgtttttcagcgaaggtacctttattcgtaatagtgttacccgcgcaattagccagagtggtggcgttgccgttccgctgattctggttgtgctgggtgccaatctggcccgtaataccctgccggaggaccctcatcatagcgttgaagatgatcgtattgaaaagaaactgctgattgccagcctggtgagccgcatgttactgccgattattgttatggcaccgctgctggccgtgaccgcaaaatatgttccggttagcattctggatgatccgatttttgtgattgtttgttttctgctgaccggcgcaccgagcgccctgcaactggcacagatttgtcagattaatggcgtttatatgggtgccatgagcaaactgctgtttcagagctatgttgtgtggattctgccgagcaccctgattctggttatggaaaccaatctgagtcgtcgtgcaagcagtattcgtaaactgcgtaaaggtagcaccgccgcaggtagcagcgatacagaatatcatgaaggtgacgcactggtgccgaccgccgaagtttttctggataatagcaaaaccctgagctattttggtggtaccgccgaaagtgaacctgatctgagcaatagcagtaaacgcgcagccaaagaaggctggctgatttttaaaaatgaaattctgcgcctgacccataccctgcgtctgaaaggttggcgcatgttaccgctggaacgcggtggcgatattgatgttgaacgtctgagcggtgcactgaccaatgccgtttatgttgtgagcccgccgaaagatctggaacagaccccgagcgataaagatggcggtaccgcaccgctggcaccgaaaaaaccgccgccgaaactgctgctgcgcatctatggtccgcaggtggaacatctgattgatcgtgaaaatgaactgcaaattctgcgtcgcctggcacgcaaaaagattggtccgcgtctgctgggtacctttgttaatggccgttttgaagaatttttccatgcccgtaccctgaccgcccatgatctgcgcgttccggcaaccagcaaacagattgcaaaacgtatgcgtgaactgcatgaaggcattgaactgctggaagaagaacgtgcagccggcccgtttgtgtggcgcaattgggataaatgggtggatcgttgcgaagaagttattagctggctggataatcagattctgagcggcaatcagagcagtgcccgcaccccgaccgaaatgtggaaacagcgcggtctgatttgcggcgttgaatggagcgtttttcgcgaaaccgtgaatcgctatcgcgcctggctggataaacagtatggcggccgtgatgccctgcgccagcagttagtgtttgcacataatgatacccagtatggtaatctgctgcgtctggaaccgagcggtgaaagcccgctgctgctgccggttaatgaacataaacagctgattgtgattgattttgaatacgcaagcgccaatctgccgggtctggaatttgcaaatcattttaccgaatggtgttataattaccatgatgcagaaaaaccgtatagtctgaccgaagcaaattatccgaccaaagatgaacagcgtacctttctgaaagcatacgttcagcatcgcccgcagtttcatgcccgcgccagcgcaacctttgcaaccgcccctggtccgggcccgagcagcagcattagcagttttatgctggatagtcgtgccccgccggcccagctggtggaagaagaaaaagaacgcgatgaagcaaccgaacgtgaagttaaacgtctgatgcgcgaagcacatctgtggcgcgttgcaaataccgcacagtgggttgcctggggcattgttcaggccaaagtgccgggcatggatgaagcattagaagatcagaaaaatccgagtccggaaagcgaacgtaccgcacgccgtggtagtagcaccagcgttaccctgtttggcagtgatccgctggaccctgatattgcagaagatattcataatcgtcgtccggaacgtctggatgcagatgcaatgggtggtgcaaccgaagtgccgaccaaagaagaagataccgatgaatttgattacctgggttatgcccatgaacgcgccatgtttttctggggtgacgcattaagtctgggtctggtgcgcaaagaagatctgccggttgatgttctgcgtaaagttaaaatggttgaatattga

SEQ ID NO: 19 - protein, 534 aa, Saccharomyces cerevisiae
  CK7
MYTNYSLTSSDAMPRTYLVGTASPEMSKKKRQSANCDKPTRRVIHIIDTNEHSEVDLKNELPITCTNEDGEMTSSSWTSQTANDFLKLAYVNAKLDPSLPSQYFKQDIINVLQSLEIPGWSVPGSKESSLNKNLLTLTQIKGALTNVIYKIRYPNLPPLLMRIFGDSIDSVIDREYELKVIARLSFYDLGPKLEGFFENGRFEKYIEGSRTSTQADFIDRDTSIKIAKKLKELHCTVPLTHKEITDQPSCWTTFDQWIKLIDSHKEWVSNNVNISENLRCSSWNFFLKSFKNYKRWLYNDSAFTSKLLREDDKDSMINSGLKMVFCHNDLQHGNLLFKSKGKDDISVGDLTIIDFEYAGPNPVVFDLSNHLNEWMQDYNDVQSFKSHIDKYPKEEDILVFAQSYINHMNENHVKIASQEVRILYNLIIEWRPCTQLFWCLWALLQSGRLPQRPLIEGEKLMSEKAGLGDETHLMEHKNKENGKYDCSEDDSFNYLGFCKEKMSVFWGDLITLGVIDKDCPDIGKTHYLDTKLIF

SEQ ID NO: 20 - DNA, 1605 bp, Saccharomyces cerevisiae
  CK7 wild type
atgtacaccaattattcacttacaagcagtgacgcaatgccccgaacttacttggtcggcacagcctcaccagaaatgtctaagaaaaagcgccagtctgcaaattgtgacaagccaacgaggagggtgatccacatcatcgatactaatgagcactcagaagtcgacttgaaaaatgaactgccaataacatgcacgaatgaagacggtgagatgacatcaagctcatggacttcacaaaccgctaatgattttctcaaactggcatacgtaaacgcgaaattagacccgtctttgccatctcaatatttcaaacaagatatcataaatgttttacaaagcttggagattcctggatggtctgtgcccggctctaaagaatcctcgttgaataagaatttattaactttgacacaaatcaagggggcccttacaaatgttatttataagattcgctatccaaacttaccccctttactgatgagaatttttggtgatagcatagattctgtaattgatagagagtatgaattaaaggttattgcgagattatcattttatgatttaggacccaaactagaagggttttttgaaaatggcagatttgaaaaatacattgagggttcgaggacatctactcaagccgactttatagatcgggatacttcaataaaaattgctaaaaaattgaaagagttgcattgtactgttccattaacgcataaagaaataacggatcaaccgtcatgctggacaacctttgatcagtggatcaaattaatagactcgcataaagagtgggtttccaataatgtaaatataagtgaaaatttacgctgttcaagttggaatttttttttaaagagtttcaaaaattataagcgttggttgtataatgattctgcttttacctcaaaattattaagagaggatgataaagatagtatgataaattctgggctaaaaatggtattttgccataacgacttacagcatggtaatttactttttaaaagtaagggtaaggatgacatctcagtgggcgatttaacaattattgactttgagtacgcaggccctaaccccgttgtatttgatttatcaaatcatttgaatgaatggatgcaagactataatgatgtgcagtctttcaagtctcatattgataagtatccaaaagaagaagatattttagtttttgcacaaagttatataaatcacatgaatgagaaccatgtcaaaattgcttctcaagaggttaggattctttacaatctaatcatcgaatggaggccttgtacacaattattctggtgcctttgggctcttttgcaaagcggaaggctaccacaacgaccactgatagaaggtgaaaaactaatgagcgaaaaggctggactaggtgatgaaacgcaccttatggagcacaaaaataaagagaatggaaaatacgattgttctgaagatgattcgttcaactatttaggattttgtaaagaaaaaatgtctgtcttttggggcgatttaattacattgggagttatcgacaaagactgcccagatattggaaaaacacattacttagacactaaacttattttttaa

SEQ ID NO: 21 - DNA, 1605 bp, Artificial Sequence
  CK7 codon optimised
atgtacaccaattacagtctgaccagtagtgatgccatgccgcgcacctatctggttggcaccgcaagtccggaaatgagcaaaaaaaaacgtcagagcgccaattgtgataaaccgacccgccgtgttattcatattattgataccaatgagcacagtgaagtggatctgaaaaatgaactgccgattacctgcaccaatgaagatggtgaaatgaccagcagtagttggaccagccagaccgcaaatgacttcctgaaactggcatacgttaatgccaaactggaccctagcctgccgagtcagtacttcaaacaggatattattaacgtgctgcaaagcctggaaattccgggctggagcgttccgggcagcaaagaaagcagcctgaataaaaatctgctgaccctgacccagattaaaggtgccctgaccaatgttatctataaaattcgctatccgaacctgccgccgctgctgatgcgtatcttcggtgatagtattgatagtgtgattgatcgcgaatatgaactgaaagtgattgcccgtctgagcttctatgatctgggcccgaaactggaaggcttcttcgaaaatggccgcttcgaaaaatatattgaaggtagtcgcaccagtacccaggccgacttcattgatcgcgataccagtattaaaattgcaaaaaaactgaaggagctgcattgtaccgttccgctgacccataaagaaattaccgatcagccgagctgctggaccaccttcgatcagtggattaaactgattgatagccataaagaatgggttagtaataatgttaacatcagtgaaaacctgcgttgtagcagttggaacttcttcctgaaatcattcaaaaattacaagcgttggctgtataatgatagtgcattcaccagtaaactgctgcgcgaagatgataaagatagcatgattaatagcggcctgaaaatggtgttctgccataatgatctgcaacatggcaatctgctgttcaaaagcaaaggcaaagatgatattagcgtgggtgatctgaccattattgacttcgaatatgccggcccgaatccggttgtgttcgatctgagtaatcatctgaatgaatggatgcaggattataatgatgtgcagagcttcaaaagccatattgataaatatccgaaggaagaagatattctggtgttcgcacagagctatattaatcacatgaatgaaaaccacgtgaaaattgccagtcaggaagttcgtattctgtataatctgattatcgaatggcgcccgtgtacccagctgttctggtgcctgtgggcactgctgcaaagcggccgtctgccgcagcgtccgctgattgaaggcgaaaaactgatgagtgaaaaagccggtctgggtgatgaaacacatctgatggaacataaaaataaggaaaacggcaaatacgattgtagtgaagatgatagcttcaattatctgggcttctgcaaagaaaaaatgagcgtgttctggggtgatctgattaccctgggtgttattgataaagattgtccggatattggtaaaacacattatctggataccaaactgatcttctga

SEQ ID NO: 22 - protein, 439 aa, Diaporthe ampelina
  CK8
MIHQNGDNSPRAGAGSDQHPPVRFISQAYDGSDSENSARQLILALRPEWSADDSNIEFVRFTDGITNTLLKAVYKRPGLSKDDVDREAILLRAYGPGTDLIIDRARETQNHELLSQHGLAPELLARFNNGMMYRFIRGSVTHPEDLRRPEIYLAVARRLAQWHATVPCLPGKTHISDKMDVRCLDALNGAAKKHTTLQEAVDAAAPGKQAPNVWTVMQKWIFALPTKTAAQRERQQLLQVELSKLVSELSHRPGLGKDGLVFAHCDLLSGNVIVLPKGSNQDSGRISNGTADSAGETVTFIDYEYAVPSPAAFDLCNHFAEWGGFDCDYNVLPTKSQRREFITEFVRSYFSLLPGQPEHDEASEIQKLADEVDLYRGVPGLYWGIWALIQATISDIDFDYASYAETRLGEYWAWKAEVDGSRIAEDKELPLRERRWAEQ

SEQ ID NO: 23 - DNA, 1320 bp, Diaporthe ampelina
  CK8 wild type
atgatacaccaaaacggcgacaacagccctcgcgccggtgccgggtctgaccagcaccctccggtccgctttatttcccaggcctacgacggctccgactccgaaaactcggcccgccagctcatcctggccctgcgcccggaatggtctgcagacgactccaacatagagtttgtgcgcttcaccgatggcatcacaaacaccctgctcaaggccgtctacaagcgccccggcctgtccaaggacgacgtcgaccgggaggccatcctgctgcgtgcatacggccccggcaccgacctgatcatcgaccgcgcccgtgagacacaaaaccacgagttgctgtcacagcatggcctggcaccagagcttctggcgcggtttaacaacggcatgatgtacaggttcatcaggggtagtgtcacgcatcctgaggacctgcggaggcccgagatatacctggccgtggcgagacggctggctcaatggcatgccacggtgccctgtctcccgggcaagacgcacatcagcgacaagatggacgtgcgctgtcttgatgcgctcaacggggctgcaaagaagcacacaactctacaggaggccgtagatgcagctgcccctgggaagcaggcccccaacgtgtggaccgtcatgcagaagtggatctttgccctgcccaccaagacggctgcacagagggagcggcaacaactgctgcaagtcgagctgtccaagttggtgtccgagctgagccaccggccaggcctgggaaaggacggtctggtcttcgcgcattgcgaccttctcagcggaaatgttattgtactgcccaagggcagcaaccaagactctggcagaatcagcaacggcaccgcagacagtgccggcgagaccgtgacctttatcgactatgaatacgccgtgccctctccggcagcattcgacctgtgcaatcactttgccgaatggggcggtttcgactgtgattacaatgtgctgcccaccaagtcccaacggcgcgagttcataaccgagttcgtccggtcgtacttcagcctcctccctgggcaacccgagcacgacgaggcgtctgagatccagaaactggccgacgaggtcgacttgtaccgcggagtcccgggattgtactggggcatttgggcgctcatccaggcgaccatctctgacatcgacttcgactacgcatcgtacgccgagaccaggctaggcgagtactgggcttggaaggccgaggttgacgggagccgcattgccgaggacaaggagctgccgctgcgggaacggcggtgggctgagcagtga

SEQ ID NO: 24 - DNA, 1320 bp, Artificial Sequence
  CK8 codon optimised
atgatccatcagaatggcgataatagcccgcgcgccggcgcaggtagcgatcaacatccgccggttcgcttcattagtcaggcctatgatggcagtgatagcgaaaatagtgcacgtcagctgattctggcactgcgcccggaatggagtgcagatgatagcaatattgagttcgtgcgcttcaccgatggtattaccaataccctgctgaaagccgtgtataaacgccctggtctgagcaaagatgatgtggatcgtgaagccattctgctgcgtgcatacggtccgggcaccgatctgattattgatcgcgcccgcgaaacacaaaatcatgaactgctgagtcagcatggtctggccccggaactgctggcacgcttcaataatggcatgatgtatcgcttcattcgcggcagcgtgacccatccggaagatctgcgtcgtccggaaatctatctggccgtggcacgccgtctggcacagtggcacgctaccgttccgtgtctgccgggtaaaacacatattagtgataaaatggacgtgcgctgtctggatgccctgaatggcgccgcaaaaaaacataccaccctgcaagaagccgtggatgccgccgcaccgggcaaacaggcccctaatgtgtggaccgtgatgcagaaatggatcttcgcactgccgaccaaaaccgccgcacagcgtgaacgtcagcagctgctgcaagttgaactgagtaaactggtgagcgaactgagccatcgtccgggtctgggcaaagatggcctggtgttcgcccattgtgatctgctgagtggcaatgtgattgtgctgccgaaaggtagtaatcaggatagtggccgcattagcaatggtaccgccgatagtgcaggtgaaaccgtgaccttcattgattatgaatatgccgtgccgagcccggcagcattcgatctgtgcaatcacttcgcagaatggggtggcttcgattgtgattataatgtgctgccgaccaagagccagcgccgcgagttcattaccgagttcgtgcgtagctacttcagcctgctgccgggtcagccggaacatgatgaagcaagtgaaattcagaaactggcagatgaagttgatctgtatcgcggtgtgccgggcctgtattggggtatctgggcactgattcaggccaccattagcgatattgacttcgattatgccagctatgcagaaaccagactgggcgaatattgggcctggaaagcagaagtggatggtagtcgtattgccgaagataaagaactgccgctgcgcgaacgtcgttgggccgaacagtga

SEQ ID NO: 25 - protein, 1374 aa, Bipolaris sorokiniana
  CK9
MSFFSAPTALRLRSLSPSSSPFVALASQSQDSITGTMFTSLENAHPSHPDFANLALLVFEAVMEVVCVSAPGYVVARMGQFDAESQKFLANLNTQLFTPFFTKLASQLTAEKLAELAVIPVIFVVQTLISYIAALAVSRIFKFNKRASNFVVAMAVFGNSNSLPISLVISLSKTLRGLHWDRIPGDNDNEVGARGILYLLIFQQLGQLVRWTWGFNVLLAPASAYKDDEGRNHALESGEYSDDETQRLLDDSHSDYESGNVTSYATSADCSDSDSDSIFNRGQAQAAALFITPTNGNATVPGAGDMSGSPKGTFANGHLNGVLAAHKKQQDTPKGIKGVPTRARLALQRSATSVSVSTTRAGNRIFNSLPKWLQGPLSKIGSGLSRFAKGVWDFMNPPLWAMLIAIFVASIPPLQRLFFTPGTFINTSVTRAVNQSGQVAVPLILVVLGANLARNTLPKEDQNSIEDPSVERKLVIASLISRMLIPTLLMAPMLALTAKYVPVSILDDPIFIIVCFLLSGAPSALQLAQICQINNVYMGAMSRILFQSYVQTMATSSNWQAQQPAGPQSSDSLALSRNNTLDDGASPRSSKAVSFPDDSTISPLIIGKNKELDQKDYLDLDKPPRHFPASVSKKRLSGRPSYEREGSSKSGAADASTALTSLLPEGSIDASSHSHQAHENLLKQVGTWLKQERSRRHARRARRKAARASTVDHESESAAAEALEKSISHHRSDSDSSHGEDALTQLAQILEKNMTLKLSEAKKRHHLHRSSIGLKRHSAISLDSDYFESVDQLVPSCEATLDNSKTMAYNVDEPGAESNLDVADKEKEAWSKFRAEILRLTHTLKLKGWRKVPSELSNEISVQRLSGALTNAVYVVSPPKNLPVPEQSEDGPPKPRNPPPKLLLRIYGPQVEHLIDRESELQILTRLARKRIGPRLLGTFGNGRFEEFLHAQPLTSKELRNPETSVQIAKRMRELHEGIDLLKKEREAGPFVWQNWDKWVNRCEHIVTWLDQQVRESSQGLSRASSDKWKKRGYVCGVEWPVFKQMIYKYRKWLEDQYGGLDKINERMVFAHNDTQYGNILRMMPEGESPLMLPANQHKQLVVIDFEYANANLPGLEFANHFTEWAYNYHDAEAPWRCNTKYYPTIEEQHRFIRAYLMHNPSYKASGGYTSNPATPHLGPLPSSGSTTALAATAAPSSISAFMLDSRAPPGEKYQEQEAQYERQIEEEARRLLAETKLWRLANSAMWVAWGIVQAHIPGLPDFDEESEDNKTSANPSAEAATLDSATAELEAAAKAEQKSTGTVSEETAAKIQAQAQMENDADLFKPQDEEEFDYLQYANDRAMFVWGDALRMGIVSQSELPEEFLQRIKLVEY

SEQ ID NO: 26 - DNA, 4125 bp, Bipolaris sorokiniana
  CK9 wild type
atgtccttcttctccgcgcccacggccttgcgcctgcgctccctctccccttcctcctctccctttgtcgccctcgcctcccagtcgcaagactccatcaccggcaccatgttcacctcgctcgagaatgcccatccctcgcatcccgactttgccaatttggctctcctcgtcttcgaggccgttatggaggtcgtctgcgtgagcgctccgggctatgttgtcgcccgaatgggtcaattcgacgcagagagccaaaagtttcttgcaaacctcaacacccaattgtttacgcctttcttcaccaagctcgcctctcaattgacggctgagaaactggcagagcttgcagtcattcccgttatttttgtcgtccagacgctcatatcttacattgccgcccttgccgtctcacgcatattcaagttcaacaaaagggcctccaactttgtcgtcgccatggcagtttttggtaactccaactcgctgcccatctctctcgtcatctccctctccaaaacactccgcggcctgcactgggacagaataccgggtgataacgacaatgaagttggtgcccgcggtatcctctacctcctcatcttccagcagctcggtcagctcgtgcggtggacttggggcttcaacgtgctcttggccccagccagcgcttacaaggacgatgagggaagaaaccatgccctcgagagtggagagtacagcgatgacgagacgcagcgtctgctcgacgactcgcattctgactatgaatctggaaatgtcacaagctacgccacctctgccgactgcagcgattcagactcggattccattttcaaccgtggtcaggcccaagcggcggccctattcattacgcccaccaatggcaatgcaacagtccctggagctggcgacatgagcggaagccccaagggcactttcgcaaacggacaccttaatggcgtgcttgcagctcacaagaaacaacaagacacacccaagggcatcaagggcgtgcccacgcgtgctcggctggcactgcaacgctcggcgacttccgtatctgtctcaacgacacgcgctggcaaccgcatcttcaacagcttgcccaagtggctccaaggacccctgtctaaaattggttcaggcttgtccaggttcgccaagggtgtttgggactttatgaaccctccgctctgggccatgttgattgccatcttcgtcgcctctattccaccgctacaacgcttgttcttcactcctggaacattcatcaacacgtcagttacgcgcgctgtaaatcaaagcggacaagtggccgtgcccctgattctggttgtcctgggcgccaatcttgctcgcaacacgctaccaaaggaggaccaaaactcaatcgaggaccccagcgtagagaggaagttggtcattgcctcgcttatcagtcgcatgctcatcccaacgcttctcatggcaccaatgctggctctgactgccaagtacgtgcccgtcagcatcctcgacgacccgattttcattattgtctgcttccttctcagcggcgcacccagcgcgcttcaactggcgcagatctgccagatcaacaatgtgtacatgggcgccatgtcgcggatcctgtttcagagctacgtgcagaccatggccacttcttccaattggcaggcccagcagcccgctggcccacagtcaagcgactctctagccctctcgcgcaacaacactttggacgacggtgcatcaccgcgctcaagcaaagccgtatcctttcccgatgacagcacaatttccccattgatcatcggcaagaacaaggagctcgaccaaaaagactacttagatcttgacaagcctcccaggcactttccagcaagtgtcagtaaaaagcgcctgtccggccgtccttcctatgaacgcgaggggtcatccaaatctggagcggccgacgccagcactgccttgacctcgctacttccagaaggctcaattgatgcgtcctctcatagccaccaagcccacgagaacctgttgaaacaggtcggcacctggctcaagcaggagcgaagccggcgccatgcacgaagggcaagacgcaaagctgccagagctagtaccgttgaccacgagtccgagagcgctgcagcagaggcactcgagaagtccatctctcaccacaggagcgattctgactcctcccatggcgaggatgcactcactcaactggcacaaattctcgaaaagaacatgaccttgaagctttccgaagcgaaaaagaggcatcacttgcacaggtcgtccattggcttaaagcgacactctgcaatttctcttgattcggactactttgagtcggtagatcagcttgtccctagttgtgaagccactttggacaattcaaagaccatggcatacaacgtcgatgagcctggggccgagtccaacctcgatgtagcagacaaggaaaaagaggcttggtccaaatttcgagctgaaatccttcgtcttactcacacgttgaaattgaagggatggaggaaggtgcccagtgagctgagcaacgaaatcagtgtacaaagactgagcggtgcacttacaaacgccgtttacgtcgtctctcctcccaagaatctaccagttcccgaacagagcgaagatggtccaccaaagcccaggaaccctccaccgaagctcctacttcgtatctatggtccacaggtagaacatctgatcgaccgagagtcggaattacagatcttgacgcgacttgcccgcaaacgtattggcccacgcctgctcggtacttttggcaatggccgatttgaagagtttctgcatgcccaaccacttacttccaaggagctacgcaacccggaaacctcagtacagatcgcaaagcgtatgcgagaacttcacgaaggtattgatttgctgaagaaagagcgagaggctggcccgtttgtttggcaaaattgggacaagtgggtcaatcgctgcgaacacattgtgacctggttggatcaacaggtccgcgagagtagccagggcctctccagagcctcttcggacaaatggaagaagcgaggatatgtgtgcggcgtcgagtggcccgtgttcaagcaaatgatttacaagtaccgaaagtggctagaggatcagtatggcggtcttgataagatcaacgagcgcatggtctttgcccataatgatacccagtatggaaatatccttcgcatgatgccagaaggcgagtcaccactgatgctaccggcaaaccagcacaagcagctagtagttattgatttcgaatacgcaaatgccaatcttcctgggttggaatttgccaatcacttcacggaatgggcgtacaactaccacgatgcagaagctccctggcgttgcaacactaagtattatccaacaatcgaagagcagcaccgttttatccgggcgtacttgatgcacaacccctcgtacaaggccagtggcggatacacgtccaatcccgctacaccacaccttggaccgcttccctcttcgggtagcacaactgccctggcagcaacagccgccccaagcagcatctccgcctttatgctcgactcgcgagctcctccaggcgaaaagtatcaagagcaggaagcccagtacgagcgacagattgaagaggaagcgcgccgcctcctggcagaaaccaaactctggcgtctcgccaactccgccatgtgggttgcctggggcatagtccaagcacacatcccgggcctccctgacttcgacgaggagagcgaagacaacaagacaagcgccaacccaagcgcagaagcagcaacgctagacagcgcaactgccgagctggaagccgcagctaaagcagagcaaaagagcacggggacagtgagtgaagaaacggcggcaaagatacaggcgcaggcgcagatggaaaatgatgctgaccttttcaagccgcaggacgaggaggaattcgattacttgcagtatgctaatgaccgggcgatgtttgtctggggggatgcgcttaggatggggattgtgagtcaaagcgagttgcccgaggagtttctgcaaaggattaagcttgtggagtattga

SEQ ID NO: 27 - DNA, 4125 bp, Artificial Sequence
  CK9 codon optimised
atgagctttttcagcgccccgaccgccctgcgcctgagatcactgagtccgagtagcagtccgtttgtggcactggcaagtcagagccaggatagcattaccggtaccatgtttaccagtctggaaaatgcacatccgagccatccggattttgccaatctggccctgctggtttttgaagccgttatggaagttgtgtgcgttagcgcaccgggctatgttgtggcacgtatgggtcagtttgatgcagaaagtcagaaatttctggcaaatctgaatacccagctgtttaccccgtttttcaccaaactggcaagccagctgaccgccgaaaaactggcagaactggcagtgattccggttatttttgtggttcagaccctgattagctatattgcagccctggccgtgagccgtatttttaaattcaataagcgtgcaagtaacttcgttgttgcaatggcagtttttggcaatagcaatagtctgccgattagcctggttattagcctgagtaaaaccctgcgcggcctgcattgggatcgcattccgggtgacaatgataatgaagtgggtgcacgcggcattctgtatctgctgatttttcagcagctgggccagctggtgcgctggacctggggttttaatgttctgctggccccggcaagtgcctataaagatgatgaaggtcgcaatcatgcactggaaagtggtgaatatagtgatgatgaaacccagcgcctgctggatgatagccatagtgattatgaaagcggcaatgtgaccagttatgccaccagcgccgattgcagcgatagtgatagtgatagcatttttaatcgcggccaggcacaggcagcagccctgtttattaccccgaccaatggtaatgccaccgttccgggtgcaggtgacatgagtggcagcccgaaaggtacctttgccaatggtcatctgaatggcgtgctggcagcccataaaaaacagcaggataccccgaaaggcattaagggcgtgccgacccgcgcacgtctggctttacagcgtagcgccaccagtgtgagtgtgagtaccacccgcgcaggtaatcgcatttttaatagcctgccgaaatggctgcaaggtccgctgagtaaaattggtagtggcctgagtcgctttgcaaaaggtgtttgggattttatgaatccgccgctgtgggccatgctgattgcaatttttgttgcaagtattccgccgctgcaacgcctgtttttcacccctggtacctttattaataccagtgtgacccgcgccgtgaatcagagcggtcaggttgccgtgccgctgattctggtggtgctgggcgccaatctggcgcgtaataccctgccgaaagaagatcagaatagcattgaagatccgagtgtggaacgtaaactggttattgccagcctgattagccgtatgctgattccgaccctgctgatggccccgatgctggcactgaccgcaaaatatgtgccggttagcattctggatgatccgatttttattattgtgtgctttctgctgagcggcgcaccgagcgccctgcaactggcacagatttgtcagattaataatgtttacatgggcgcaatgagtcgtattctgtttcagagttatgttcagacaatggctaccagtagcaattggcaggcacagcagccggccggcccgcagagcagcgacagcttagcactgagccgcaataataccctggatgatggcgcaagtccgcgcagtagcaaagccgttagttttccggatgatagtaccattagtccgctgattattggtaaaaataaggaactggatcagaaagattacctggatctggataaaccgccgcgccattttccggccagcgtgagcaaaaaacgtctgagcggtcgcccgagctatgaacgtgaaggcagcagcaaaagcggcgcagccgatgcaagtaccgcactgaccagcctgctgccggaaggcagcattgatgccagtagtcatagccatcaggcccatgaaaatctgctgaaacaggttggtacctggctgaaacaggaacgcagccgtcgccatgcacgccgtgccagacgcaaagccgcacgcgcttcaaccgtggatcatgaaagtgaaagtgccgcagccgaagcactggaaaaaagtattagtcatcatcgtagcgatagcgatagtagtcatggtgaagatgccctgacccagctggcccagattctggaaaagaatatgaccctgaaactgagtgaagcaaaaaagcgtcatcatctgcatcgtagtagtattggcctgaaacgccatagtgcaattagtctggatagcgattattttgaaagtgttgatcagctggtgccgagctgcgaagcaaccctggataatagcaaaacaatggcttataatgtggatgaaccgggcgccgaaagtaatctggatgttgccgataaagaaaaagaagcatggagtaaattccgtgccgaaattctgcgcctgacccataccctgaaactgaaaggctggcgtaaagtgccgagcgaactgagtaatgaaattagcgtgcagcgtctgagcggcgcgctgaccaatgccgtgtatgtggttagcccgccgaaaaatctgccggttccggaacagagtgaagatggtccgccgaaaccgcgtaatccgccgccgaaactgctgctgcgcatctatggcccgcaggttgaacatctgattgatcgtgaaagtgaactgcaaattctgacccgcctggcacgtaaacgtattggtccgcgtctgctgggcacctttggtaatggtcgttttgaagaatttctgcacgctcagccgctgaccagcaaagaactgcgcaatccggaaaccagcgtgcagattgcaaaacgtatgcgtgaactgcatgaaggcattgatctgctgaaaaaagaacgcgaagccggcccgtttgtttggcagaattgggataaatgggtgaatcgttgcgaacatattgtgacctggctggatcagcaggttcgcgaaagcagtcagggcctgagtcgtgcaagtagcgataaatggaaaaaacgtggctatgtgtgtggcgttgaatggccggtgtttaaacagatgatctataaatatcgcaagtggctggaagatcagtatggcggtctggataaaattaatgaacgcatggtttttgcccataatgatacccagtatggcaatattctgcgcatgatgccggaaggcgaaagcccgctgatgctgccggcaaatcagcataaacagctggtggttattgattttgaatatgcaaatgcaaacctgccgggcctggaatttgccaatcattttaccgaatgggcctataattatcatgatgcagaagccccgtggcgttgcaataccaaatattatccgaccattgaagaacagcatcgctttattcgcgcctatctgatgcataatccgagctataaagccagcggtggctataccagcaatccggccaccccgcatctgggtccgctgcctagcagcggtagtaccaccgcactggccgcaaccgccgcacctagcagtattagcgcctttatgctggatagccgtgcaccgccgggtgaaaaatatcaggaacaggaagcccagtatgaacgccagattgaagaagaagcccgccgtctgctggcagaaaccaaactgtggcgtctggccaatagtgccatgtgggttgcctggggcattgtgcaggcccatattccgggtctgccggattttgatgaagaaagcgaagataataagaccagcgcaaatccgagcgcagaagcagcaaccctggacagtgcaaccgcagaactggaagccgccgccaaagcagaacagaaaagtaccggcaccgtgagtgaagaaaccgccgcaaaaattcaggcacaggcgcagatggaaaatgatgccgatctgtttaaaccgcaggatgaagaagaatttgattatctgcaatacgcaaatgatcgcgccatgtttgtttggggtgacgcactgcgcatgggtattgtgagccagagtgaactgccggaagaatttttacagcgcattaagctggtggaatattga

SEQ ID NO: 28 - protein, 369 aa, Paramicrosporidium saccamoebae
  CK10
MIFSVLQSENACEVAEAVLSLVQSVLGIWLHSSAQDIQVYRISSAMTNMVFSVTLSCAGPSEEDTESATWHPERLLLRVYGNSNWMFQRDLEESTALVLTEHGIIPQWYGVFGNGRFEDYIPSTSVSAREFQSPELCAEISKCLGRIHNMLPNVVEATTWENRDYMLERLESWRLAACLSMSNLLQRKLSSDHAEILRKIELWDAFSPEFIPTLRCRIAQVDSPVVFAHCDLHHGNVLRFHAKDGVIAIDFEYGMPTFRGFDLANFLSEFCYDYNSPTPEVPDWSNYPSRDTIVRILQNYLGESPPEDVYKIMDEISVFAAAVQLFWGHWCLIKAVDMVDDGYKGFDYITSAFERYKRFIQLTEQLAIV

SEQ ID NO: 29 - DNA, 1110 bp, Paramicrosporidium saccamoebae
  CK10 wild type
atgatttttagtgtcctacagtctgaaaacgcctgcgaggtcgctgaagctgtgctctcgctcgttcagagcgtgttggggatttggctccattcaagtgcccaagacattcaagtctatcgcatcagctcggcaatgactaacatggtgttttctgtgacgctttcgtgtgccgggccctctgaggaggatacagaatctgccacttggcatcccgagaggctgctcttacgagtctatggaaattcaaattggatgtttcagcgcgacttggaagagtcgacggcgttagtgctaaccgagcacggcataattccgcaatggtatggggtgtttggaaatggccgtttcgaggactatatcccgagcacttcagtgtcggcccgagagtttcagtccccggaactatgtgcagagatctcaaagtgtctggggagaattcacaacatgctgccaaacgtcgtcgaggccacgacgtgggagaatcgggattacatgctcgagcgcttagagtcctggcgtcttgcggcttgtctctcaatgtcgaacctcttgcaacgaaagttgagcagtgatcatgctgaaattctaaggaagattgaactgtgggatgcattttctcctgaatttatccccacgcttagatgcaggattgcacaagttgactctcccgtcgtctttgctcattgtgatttgcaccatggcaatgtgctgaggtttcatgcaaaagatggggtcattgccattgactttgagtatgggatgccgacattcagagggttcgatttggccaattttttgagcgagttttgctacgactacaactcacccaccccagaagtacccgattggtccaactatccatcaagagacactattgtccggattctccaaaactacctcggggagagtccccctgaagatgtttacaaaattatggacgagattagtgtctttgcagcagctgtgcagctgttttgggggcattggtgcctgatcaaggctgtggacatggtcgatgatggatataaaggattcgactatatcacttctgcatttgaacggtacaagagatttattcagctcaccgagcaacttgcgattgtgtaa

SEQ ID NO: 30 - DNA, 1110 bp, Artificial Sequence
  CK10 codon optimised
atgatcttcagcgtgctgcaaagtgaaaatgcatgtgaagttgccgaagccgttctgagtctggttcagagtgttctgggcatctggctgcatagcagcgcccaggatattcaggtgtatcgtattagtagcgcaatgaccaatatggtgttcagcgtgaccctgagttgtgccggcccgagcgaagaagataccgaaagcgcaacctggcatccggaacgcctgctgctgcgcgtgtatggcaatagcaattggatgttccagcgcgatctggaagaaagcaccgccctggtgctgaccgaacatggtattattccgcagtggtatggcgtgttcggtaatggccgcttcgaagattatattccgagcaccagcgttagtgcccgcgagttccagagcccggaactgtgcgcagaaattagtaaatgtctgggtcgtattcataatatgctgccgaatgtggtggaagcaaccacctgggaaaatcgcgattatatgctggaacgcctggaaagttggcgcctggcagcatgtctgagcatgagcaatctgctgcaacgtaaactgagtagtgatcatgcagaaattctgcgtaaaattgaactgtgggatgccttcagcccggagttcattccgaccctgcgctgccgcattgcacaggttgatagtccggtggtgttcgcacattgtgatctgcatcatggtaatgtgctgcgcttccatgccaaagatggcgtgattgcaattgacttcgaatatggtatgccgaccttccgtggcttcgatctggccaacttcctgagtgagttctgttatgattataatagtccgaccccggaagtgccggattggagtaattatccgagtcgcgataccattgtgcgcattctgcaaaattatctgggcgaaagcccgccggaagatgtgtataaaattatggatgaaatcagcgtgttcgccgcagcagttcagctgttctggggtcattggtgtctgattaaagcagttgatatggttgatgatggctataaaggcttcgattatattaccagcgccttcgaacgctataaacgcttcattcagctgaccgaacagctggccattgtttga

SEQ ID NO: 31 - protein, 397 aa, Catenaria anguillulae
  CK11
MTAPTISVRRIDYTVDSNNPQALDSSARHLGVVLGLCSEADAQAAKVTRCKQGITNKLLKVSLPSGNKYLMRVYGHGTSTLIDRDAEVRNMAYLASHGLAPPLHARFNNGLVYGFVKGTAAHPDALAHPQVWPAIAKHLAEWHSLPLPSPSSPSNDGAQAPPPASQLFVTLDRWLGMVTQAAQARDGPTATQFEGIALADLGAERDRLFATLPASPLTFNHNDLLSGNVILQHDQAHADLDAIDLSGDANEVDPSDTPDALASVVSAKFIDYEYGALGPAAFDVANHWCEWAGFECEYWRYPATETQRAWLTTYLTALNKEAKPPTVAEVDTWVEHVKEYTPASHFFWILWALVQATVSDIDFDYAGYARLRWSELKRWCEARCRRPSRISSSRIRP

SEQ ID NO: 32 - DNA, 1194 bp, Catenaria anguillulae
  CK11 wild type
atgaccgcacctaccatcagcgtccgccgcatcgactacacagtcgactccaacaacccacaggccctcgactcgtctgcccgccacctcggcgtcgtgctgggcctgtgctccgaggccgacgcccaggccgccaaggtgacccgatgcaagcagggcatcaccaacaagctcctcaaggtgtcgctgccctcaggcaacaagtaccttatgcgcgtctacggccacggcacctcgaccctcattgaccgcgacgccgaggtccgaaacatggcctacttggcatcccacggcctcgccccgccgctccatgcacgcttcaacaatggcctcgtgtacggctttgtcaagggcacggccgcgcacccggatgctctggcgcacccgcaagtgtggccagcaattgcaaagcacttggccgaatggcactcgctgcctctgccctcgccgtcgtcgccgtcaaacgatggcgcacaggcgccgccgcctgcatcgcagttgtttgtcactctggaccgctggctcggtatggtcacgcaagccgctcaagcccgcgacggcccgacggcaacgcaatttgagggcattgccctggctgacctcggcgccgaacgtgaccgcctctttgcaacgcttcctgcgtcgccgctcaccttcaaccacaatgacctgctctcgggcaatgtcattttgcaacacgaccaagcgcacgccgacttggacgccattgacctgtcgggcgacgccaacgaggtggacccttcggatacgcccgatgctttggccagtgtagtgtctgccaaattcattgattacgagtacggcgcccttggccctgcggcgttcgatgtggccaaccactggtgcgagtgggccgggttcgagtgcgagtactggcggtaccccgcaacagagacgcagcgcgcgtggttgacgacctacttgacggcgctcaacaaggaggccaagccgcccacggtggccgaggtcgacacatgggtggaacatgtcaaggagtacacgccggcatcgcacttcttttggattctgtgggcgctggtgcaagccacggtgagcgacattgattttgattatgccgggtatgcacggttgaggtggagcgagctcaagcgctggtgcgaggccagatgccgccggccaagccgcatctcgtcgagtcggattcggccgtga

SEQ ID NO: 33 - DNA, 1194 bp, Artificial Sequence
  CK11 codon optimised
atgaccgccccgaccattagcgtgcgccgtattgattataccgtggatagcaataatccgcaggcactggatagcagcgcacgccatctgggcgttgtgctgggcctgtgcagtgaagcagatgcacaggccgcaaaagtgacccgctgtaaacagggtattaccaataaactgctgaaagttagcctgccgagcggtaataaatatctgatgcgtgtgtatggtcatggcaccagtaccctgattgatcgtgatgccgaagtgcgtaatatggcatatctggcaagtcatggtctggcaccgccgctgcacgctcgcttcaataatggcctggtgtatggcttcgttaaaggcaccgccgcacatccggatgccctggcacatccgcaggtgtggccggctattgccaaacatctggccgaatggcatagcctgccgctgccgagtccgagtagtccgagtaatgatggcgcccaggcaccgccgccggcaagccagttattcgtgaccctggatcgctggctgggcatggtgacccaggcagcccaggcacgtgatggtccgaccgcaacccagttcgaaggcattgcactggcagatctgggcgccgaacgtgatcgcctgttcgcaaccctgccggcaagtccgctgaccttcaatcataatgatctgctgagcggcaatgtgattctgcaacatgatcaggcacatgcagatctggatgcaattgatctgagtggtgatgcaaatgaagtggaccctagcgataccccggatgcactggccagtgttgttagcgcaaaattcattgattatgaatacggtgcactgggtccggccgccttcgatgtggcaaatcattggtgcgaatgggccggcttcgaatgcgaatattggcgttatccggcaaccgaaacacaacgcgcatggctgaccacctatctgaccgcactgaataaagaagccaaaccgccgaccgtggcagaagtggatacctgggtggaacatgttaaagaatataccccggccagccacttcttctggattctgtgggcactggttcaggcaaccgttagtgatattgacttcgattatgcaggctatgcacgcctgcgttggagcgaactgaaacgttggtgcgaagcccgttgtcgtcgtccgagtcgtattagtagtagccgtattcgtccgtga

SEQ ID NO: 34 - protein, 369 aa, Mucor circinelloides
  CK12
MASPEGETLPSIPGCDTIIDLAVLKGDELTNKVLKLIQVLFPDYAENLEKIELNRVSGALTNAVFFVNAPNKRRLLLRVYGNGVDQIIDRENELAWLARLSSLNIGPSLLGIFGNGRFEEYLPSTTLTHHDIRDPETSKGIAACIRELHDIVAVYPFSPEKNHLEIWANIDKWYQVVMSLLPVLYKKSDGWTQVLTTFNLERLTFEIEECKQILEAAKSPIVFGHNDTQYGNVLKLEKTNELVIVDFEYAGYNPRGFDIANHFCEWTYDYHSEQPASMDTSQYPTYEEQIRFLNAYLETKSKNDNPDILDKAVTAECLQKEAAMWLMASHLSWGLWGLIQASQSEIDFDYFLFSTQRLNAFREEFAKWK

SEQ ID NO: 35 - DNA, 1110 bp, Mucor circinelloides
  CK12 wild type
atggcatcacccgaaggagaaacgctgccttctattccaggctgtgatacaatcattgatctagctgtgcttaaaggagacgaattaacaaacaaagtgctcaagttgattcaagtacttttcccggattatgctgaaaacctcgagaaaatcgaactgaatagagtgagtggtgccttgacaaatgccgtcttttttgtcaacgcacccaacaagcgccgtttattgttgagagtatacggtaatggagtggatcagattattgaccgagagaatgaattagcttggcttgctcgcctctctagcttgaatattggacctagtttattaggcatatttggtaacggtcgatttgaggagtatttgccttccaccactttgacgcaccatgacattcgtgaccccgagacttccaagggaattgctgcttgtattcgcgaattgcacgacattgtagcagtatatccattctcaccagaaaagaatcatttggagatttgggccaacattgataaatggtatcaggttgtcatgtcgttgttaccagtactttacaaaaagagcgatggctggacacaagtgctgacgacctttaatttggagcgtttgacatttgaaattgaagagtgtaaacaaatcttggaagctgctaaatcgcccattgtatttgggcataatgatacacaatatggcaatgtgctcaagttggaaaagacaaacgaattggtgattgttgatttcgaatacgcaggctataatccccgtggatttgacattgctaaccacttttgtgaatggacatacgactatcactctgaacagcctgcctcaatggacacaagtcaatatcctacctacgaagagcaaatcagattcctgaacgcctatctcgaaaccaagtctaagaacgacaatccagacattttagacaaagcagttacagctgaatgcttacagaaagaggctgccatgtggctcatggccagccatctgtcctggggtttgtggggtttgatccaagcaagtcaaagcgagattgatttcgactactttttgttctctactcaacgtttgaatgctttccgcgaagagtttgctaaatggaaatga

SEQ ID NO: 36 - DNA, 1110 bp, Artificial Sequence
  CK12 codon optimised
atggcaagcccggaaggcgaaaccttaccgagcattccgggctgcgataccattattgatctggcagttctgaaaggtgatgaactgaccaataaagttctgaaactgattcaggttctgttcccggattatgcagaaaatctggaaaaaattgagctgaatcgcgtgagcggcgcactgaccaatgccgtgttcttcgtgaatgccccgaataaacgccgcctgctgctgcgcgtgtatggcaatggcgttgatcagattattgatcgcgaaaatgaactggcctggctggcacgcctgagtagcctgaatattggtccgagtctgctgggcatcttcggtaatggccgcttcgaagaatatctgccgagtaccaccctgacccatcatgatattcgtgatccggaaaccagtaaaggcattgccgcatgtattcgcgaactgcatgatattgttgccgtgtatccgttcagcccggaaaaaaatcatctggaaatctgggcaaatattgataaatggtatcaggtggttatgagcctgctgccggtgctgtataaaaaaagtgatggttggacccaggtgctgaccaccttcaatctggaacgtctgaccttcgaaattgaagaatgtaaacagattctggaagccgccaaaagtccgattgtgttcggccataatgatacccagtatggtaatgttctgaaattagaaaagaccaatgagctggttattgttgacttcgaatatgccggctataatccgcgcggcttcgatattgcaaatcacttctgtgaatggacctatgattatcatagtgaacagccggccagcatggataccagccagtatccgacctatgaagaacagattcgcttcctgaatgcctatctggaaaccaaaagtaaaaatgataacccggatattctggataaagcagttaccgcagaatgtctgcaaaaagaagcagccatgtggctgatggcaagccatctgagctggggtctgtggggtctgattcaggcaagccagagtgaaattgacttcgattacttcctgttcagcacccagcgcctgaatgcattccgcgaagagttcgcaaaatggaaatga

SEQ ID NO: 37 - protein, 262 aa, Escherichia coli
  HTK1
MQVDLLGSAQSAHALHLFHQHSPLVHCMTNDVVQTFTANTLLALGASPAMVIETEEASQFAAIASALLINVGTLTQPRAQAMRAAVEQAKSSQTPWTLDPVAVGALDYRRHFCHELLSFKPAAIRGNASEIMALAGIANGGRGVDTTDAAANAIPAAQTLARETGAIVVVTGEMDYVTDGHRIIGIHGGDPLMTKVVGTGCALSAVVAACCALPGDTLENVASACHWMKQAGERAVARSEGPGSFVPHFLDALWQLTQEVQA

SEQ ID NO: 38 - DNA, 789 bp, Escherichia coli
  HTK1 wild type
atgcaagtcgacctgctgggttcagcgcaatctgcgcacgcgttacacctttttcaccaacattcccctcttgtgcactgcatgaccaatgatgtggtgcaaacctttaccgccaataccttgctggcgctcggtgcatcgccagcgatggttatcgaaaccgaagaggccagtcagtttgcggctatcgccagtgccttgttgattaacgttggcacactgacgcagccacgcgctcaggcgatgcgtgctgccgttgagcaagcaaaaagctctcaaacaccctggacgcttgatccagtagcggtgggtgcgctcgattatcgccgccatttttgtcatgaacttttatcttttaaaccggcagcgatacgtggtaatgcttcggaaatcatggcattagctggcattgctaatggcggacggggagtggataccactgacgccgcagctaacgcgatacccgctgcacaaacactggcacgggaaactggcgcaatcgtcgtggtcactggcgagatggattatgttaccgatggacatcgtatcattggtattcacggtggtgatccgttaatgaccaaagtggtaggaactggctgtgcattatcggcggttgtcgctgcctgctgtgcgttaccaggcgatacgctggaaaatgtcgcatctgcctgtcactggatgaaacaagccggagaacgcgcagtcgccagaagcgaggggccaggcagttttgttccacatttccttgatgcgctctggcaattgacgcaggaggtgcaggcatga

SEQ ID NO: 39 - DNA, 789 bp, Artificial Sequence
  HTK1 codon optimised
atgcaggtggatctgctgggtagcgcacagagcgcccatgccctgcatctgttccatcagcatagcccgctggttcattgtatgaccaatgatgtggtgcagaccttcaccgccaataccctgctggcactgggcgcaagtccggcaatggtgattgaaaccgaagaagcaagtcagttcgccgcaattgcaagcgccctgctgattaatgtgggcaccctgacccagccgcgcgcacaagcaatgcgcgccgcagtggaacaggccaaaagcagtcagaccccgtggaccctggaccctgtggcagttggtgcactggattatcgtcgccacttctgtcatgaactgctgagcttcaaaccggccgccattcgcggcaatgcaagtgaaattatggccctggccggtattgccaatggcggccgtggtgttgataccaccgatgcagcagcaaatgccattccggcagcccagaccctggcacgcgaaaccggcgctattgttgttgtgaccggtgaaatggattatgtgaccgatggtcatcgcattattggcattcatggtggtgatccgctgatgaccaaagttgttggtaccggttgtgcactgagtgccgttgtggccgcatgttgtgcactgccgggcgataccctggaaaatgtggccagcgcatgtcattggatgaaacaggcaggtgaacgtgcagttgcccgcagcgaaggccctggtagcttcgtgccgcacttcctggatgccctgtggcagctgacccaggaagttcaggcctga

SEQ ID NO: 40 - protein, 224 aa, Bacillus licheniformis
  HTK2
MTRVSEEAMKDLLSVYFIMGSNNTAGDPLTVIEKALKGGATLFQFREKGEGALKAGDQTAFARQVQALCKQFNVPFIINDDVELALELDADGVHIGQDDDKAADVRARIGDKILGVSAHTLEEVLKAEKDGADYIGAGPVYPTETKRDTKAVQGVSLIQEIRRQGIGIPVVGIGGITVENCVPVIEAGADGISVISAISKAADPKQAAEAFSEKVQATKQSAHS

SEQ ID NO: 41 - DNA, 675 bp, Bacillus licheniformis
  HTK2 wild type
atgacgcgagtctcagaagaagcaatgaaagatctgttgtcggtctattttattatggggtcaaacaataccgcaggggatcctttaactgttattgaaaaagctttaaaaggcggtgcgaccctttttcaattccgcgaaaaaggcgagggtgcgttgaaagccggagatcaaacggcgtttgcccgacaggtgcaggcgctgtgcaaacagttcaatgtaccgtttattatcaacgatgatgtagaactcgcgcttgaacttgacgcagatggcgtgcatatcggccaggatgatgataaggccgcagacgtcagagcgagaatcggggacaaaatcctcggcgtttccgcgcatacacttgaagaagtcttaaaggcggaaaaggatggagcggattacatcggtgcggggcctgtttaccctactgaaacaaagcgggatacaaaagctgtgcagggcgtctcgctcattcaagagatccgcaggcagggaattggcattcctgtggtcggaatcggcgggatcacggtcgaaaactgcgtccccgtcatcgaggccggggcggacggcatcagtgtcatcagcgccatcagcaaagccgccgatccaaagcaggccgccgaggcgtttagcgagaaagtccaagctaccaaacaaagcgcacattcctaa

SEQ ID NO: 42 - DNA, 675 bp, Artificial Sequence
  HTK2 codon optimised
atgacccgtgtgagcgaagaagcaatgaaagatctgctgagcgtgtacttcattatgggcagtaataataccgcaggcgatccgctgaccgttattgaaaaagcactgaaaggcggtgccaccctgttccagttccgtgaaaaaggtgaaggcgccctgaaagcaggcgatcagaccgcattcgcacgtcaggtgcaggcactgtgtaaacagttcaatgttccgttcattattaacgatgatgttgaactggcactggaactggatgccgatggtgttcatattggtcaggatgatgataaagccgccgatgtgcgcgcccgtattggtgataaaattctgggtgtgagcgcacataccctggaagaagtgctgaaagccgaaaaagatggcgcagattatattggtgccggcccggtgtatccgaccgaaaccaaacgcgataccaaagccgtgcagggtgttagtctgattcaggaaattcgtcgtcagggcattggcattccggtggtgggtattggtggcattaccgttgaaaattgtgtgccggtgattgaagccggtgcagatggcattagtgttattagcgccattagcaaagcagcagatccgaaacaggccgcagaagcattcagcgaaaaagttcaggcaaccaaacagagcgcccatagctga

SEQ ID NO: 43 - protein, 275 aa, Clostridium algidicarnis
  HTK3
MNYIDKSIDLIRLTKEKNPLVDFAVNYVTANDSTSVTSYIGGSPVMTDDSIDAADVVEYGNVDALIFNIGTITEKQYHSMMEAGKRATERGIPIVIDPVATSITPFRTMIIQRMLDELNVSVIKGNLGEIKACLGLKTNSKGVDSNENPEGAEEFCIKLARKRNLVVAMTGPKDIITDGERIVVIENGTDRLPKVIGTGCILGAMVATYCGATNDYVLAASTAIMLMGVAGELASEITKEDEGHYKFKVNLIDVLSTIVDNEDKIKAKANMKIIK

SEQ ID NO: 44 - DNA, 828 bp, Clostridium algidicarnis
  HTK3 wild type
atgaactatatagataaatcaatagacctaattagacttacaaaggagaaaaaccctcttgtggattttgcggtaaactatgttactgcaaatgattctactagtgtaacctcttacattggaggtagccctgtgatgacagatgattctatagatgctgcggatgttgtggaatacggtaatgtagatgcattaatatttaacataggaactataacagaaaagcagtatcactctatgatggaagctggtaaaagggctactgaaagaggaattcctatagtaatagaccctgtagcaactagtattacaccttttagaactatgattatccaaagaatgcttgatgaacttaatgtttctgtaataaagggaaaccttggggaaattaaagcttgccttggtcttaagacaaactcaaaaggtgttgattctaatgaaaaccctgagggtgcagaagaattctgcattaaacttgcaagaaaaagaaacttagtagttgcaatgactggtccaaaggatataataacggacggtgaaagaatagttgttattgaaaatggtacggacaggcttccaaaggttataggaactggctgtattctaggtgctatggttgctacctattgtggtgctactaatgattacgtattagcagcttctacagctataatgcttatgggagtagctggtgagcttgcaagtgaaattacaaaggaagatgaaggacactataagtttaaagttaatttaatagatgtattatctactatagtggacaatgaagataaaataaaagccaaggctaacatgaaaattattaaatag

SEQ ID NO: 45 - DNA, 828 bp, Artificial Sequence
  HTK3 codon optimised
atgaactacatcgataagagcattgatctgattcgcctgaccaaagaaaaaaatccgctggtggacttcgcagtgaattatgtgaccgcaaatgatagtaccagtgtgaccagttatattggcggtagcccggttatgaccgatgatagtattgatgccgcagatgtggtggaatatggcaatgttgatgcactgatcttcaatattggtaccattaccgaaaaacagtatcatagcatgatggaagcaggcaaacgtgcaaccgaacgtggtattccgattgttattgatccggtggcaaccagcattaccccgttccgtaccatgattattcagcgtatgctggatgaactgaatgttagcgttattaaaggcaatctgggcgaaattaaagcatgtctgggcctgaaaaccaatagcaaaggcgttgatagtaatgaaaatccggaaggtgcagaagagttctgtattaaactggcacgtaaacgtaatctggtggtggcaatgaccggtccgaaagatattattaccgatggtgaacgcattgtggtgattgaaaatggcaccgatcgtctgccgaaagtgattggtaccggctgcattctgggtgcaatggtggccacctattgcggtgcaaccaatgattatgtgctggccgccagtaccgccattatgctgatgggtgttgccggtgaactggccagtgaaattaccaaagaagatgaaggtcattataagttcaaggtgaatctgattgatgttctgagcaccattgttgataatgaagataaaatcaaggccaaagcaaatatgaaaatcattaagtga

SEQ ID NO: 46 - protein, 279 aa, Aerococcus sp.
  HTK4
MSKKISLPFAKYSQQVKEKAPLIQVLNNYVTIHDVANVILASGGRPVMTDNLPNSQDVVKTADLLLLNAASPRPNQELLDLATTAKNDHHPVVLDPVGVSAMPSKLKLCQDLIDQGLVTAVKGNASEIRSLLFEKSQGSGVDLGPGDEVTLANLADFAPDFKAYAQEKRIILAMSGPIDLVTDGKRLAVIENGHPWMASYTGSGCQLSGVLASFLAGNPDEDPFYLATAAVISYGVAGEIAAQVLQPYEGNATYSNRVIDQVFLLEAKELERRAKYDIQ

SEQ ID NO: 47 - DNA, 840 bp, Aerococcus sp.
  HTK4 wild type
atgtctaaaaaaataagccttccctttgcgaaatatagtcagcaggtcaaggagaaagccccgctgatccaagtcttaaataattatgtcaccatacatgatgtggccaatgtgattttggccagtggcgggcgtcccgtgatgaccgataacttacctaatagtcaggatgtagtcaagacagctgaccttttgctattgaatgccgctagtcccagacctaatcaggaattgttggacctcgccaccacagcgaaaaatgatcaccatcccgtggtcttagacccagtgggggtttcagcgatgccgtctaaattaaagctctgtcaagatctgattgaccaggggttagtgacagcggtgaaggggaatgcttcggaaattcgaagtctcctttttgaaaaaagccaaggatctggggtcgacctgggtcctggagacgaggtaaccttagccaacctggctgattttgctccggactttaaagcttatgcccaagaaaaaagaattatcctagccatgtcgggtccgattgacttagtgacagacggcaagcggctggcagtcattgaaaatggccacccctggatggcttcctatacggggtcaggttgccagttaagcggcgtcctagctagctttttagccggtaatccggatgaggatcctttttacctagctacagcagccgtgattagctatggggtggcgggagaaattgctgcccaagtcctccagccttatgagggcaatgccacttattccaaccgggtgattgaccaggttttcttattagaggccaaagaattagaaaggagagccaagtatgacattcaataa

SEQ ID NO: 48 - DNA, 840 bp, Artificial Sequence
  HTK4 codon optimised
atgagtaagaagatcagcctgccgttcgccaaatatagccagcaggttaaagaaaaagccccgctgattcaggtgctgaataattatgtgaccattcatgatgtggcaaatgttattctggccagcggtggccgtccggtgatgaccgataatctgccgaatagtcaggatgtggttaaaaccgcagatctgctgctgctgaatgccgcaagtccgcgcccgaatcaggaactgctggatctggcaaccaccgcaaaaaatgatcatcatccggttgttctggaccctgttggcgttagtgcaatgccgagtaaactgaaactgtgccaggatctgattgatcagggtctggtgaccgccgttaaaggtaatgcaagcgaaattcgtagcctgctgttcgaaaaaagtcagggcagcggtgttgatctgggtccgggtgatgaagtgaccctggccaatctggcagacttcgcaccggacttcaaagcctatgcacaggaaaaacgtattattctggccatgagcggtccgattgatctggtgaccgatggtaaacgtctggccgttattgaaaatggccatccgtggatggcaagctataccggtagtggttgccagctgagcggcgttctggcatcattcctggcaggtaatccggatgaagatccgttctatctggcaaccgccgcagttattagttatggtgtggcaggtgaaattgcagcacaggttctgcaaccgtatgaaggtaatgcaacctatagcaatcgcgttattgatcaggtgttcctgctggaagccaaagaactggaacgccgtgccaaatatgatattcagtga

SEQ ID NO: 49 - protein, 280 aa, Lactobacillus casei
  HTK5
MSKVITDVFYTAFKTALPLTSSPLVQCITNEITVESMANALLYIDAKPVMADDQREFPEFFAQSDALLLNLGHISEVRQQNLLAAGKFAQATNQPTVIDLVGVSATQLRYDLGHQLLANHPNVVKGNISEMRRFADLKSTGRGVDGSQLDQSATALGELAASLQQLTQAFPTTTFLATGKIDLVVSAKGTWYLKNGVPQLDRFTGTGDIVGALIAALLGTGLDNDAAVVVAVSYFNCCGEVAAAQNRTGGLAAFREGTLNQLSLLAATADWLQMVKGEAL

SEQ ID NO: 50 - DNA, 843 bp, Lactobacillus casei
  HTK5 wild type
atgtcaaaagtaatcactgacgttttttacaccgcgttcaaaaccgccctgccattaacatcatccccactggtgcaatgcattaccaacgaaataaccgtcgaatccatggctaatgcattgctttacattgatgcgaagccggtcatggctgatgatcagcgcgagttcccggaattctttgctcaaagtgatgcgttgctgttgaatcttggacacatttccgaagtgcgccagcagaatctattagccgctggcaagtttgcgcaggccaccaaccagccaacggtgattgatttggtcggcgtttctgccacccagttgcgctatgacttaggccatcaattgttagccaatcatccgaacgtggtcaaaggtaacatttctgaaatgcgtcgattcgctgatctaaaaagcacaggccgcggcgttgatggaagccagttagatcaaagtgcgaccgccttgggagaactagccgcgagcttgcagcagctgacccaagcgtttcccaccactaccttcttggcaaccggcaagattgatctcgttgtgagtgcgaaggggacttggtatttgaaaaatggggtgccgcagctggatcgtttcaccgggactggtgacattgtcggtgccttgattgccgcgctgttggggacaggtttggacaacgacgcagcagtcgtcgtggctgtgagttacttcaactgctgtggcgaagtagcagctgcgcagaatcgaaccggcggactggcggcatttcgcgaaggtaccttgaatcaactttccttactggccgccaccgctgactggcttcaaatggtgaaaggggaagcgttatga

SEQ ID NO: 51 - DNA, 843 bp, Artificial Sequence
  HTK5 codon optimised
atgagcaaagttatcaccgatgtgttctataccgccttcaaaaccgccctgccgctgaccagtagtccgctggttcagtgtattaccaatgaaattaccgttgaaagcatggccaatgccctgctgtatattgatgccaaaccggttatggcagatgatcagcgcgagttcccggagttcttcgcccagagcgatgcactgctgctgaatctgggccatattagtgaagtgcgccagcagaatctgctggcagcaggtaaattcgcccaggcaaccaatcagccgaccgtgattgatctggtgggtgttagtgcaacccagctgcgttatgatctgggccatcagctgctggcaaatcatccgaatgtggtgaaaggtaatattagtgaaatgcgccgcttcgccgatctgaaaagtaccggtcgcggtgtggatggtagccagctggatcagagtgcaaccgcactgggcgaactggccgccagcctgcaacagctgacccaggcattcccgaccaccaccttcctggcaaccggtaaaattgatctggttgtgagcgcaaaaggcacctggtatctgaaaaatggtgttccgcagctggatcgcttcaccggcaccggtgatattgtgggtgccctgattgccgcactgctgggtaccggcctggataatgatgcagccgttgtggtggcagtgagttacttcaattgctgtggtgaagttgcagccgcacagaatcgcaccggcggtctggcagccttccgcgaaggtaccctgaatcagctgagtctgctggcagccaccgccgattggctgcaaatggttaaaggtgaagcactgtga

SEQ ID NO: 52 - protein, 262 aa, Shigella boydii
  HTK6
MQVDLLSSAQSAHTLHLFHQHSPLVHCMTNDVVQTFTANTLLALGASPAMVIETEEASQFAAIASALLINVGTLTQPRAQAMRAAVEQAKSSQTPWTLDPVAVGALDYRRRFCLELLSHKPTAIRGNASEIMALAGVANGGRGVDTTDAAANAIPAAQTLARETGAIVVVTGEVDYVTDGHRIVGIHGGDPLMTKVVGTGCALSAVVAACCALPGDMLENVASACHWMKQAGERAVARSEGPGSFVPHFLDALWQLTQEVQA

SEQ ID NO: 53 - DNA, 789 bp, Shigella boydii
  HTK6 wild type
atgcaagtcgacctgctgagttccgcgcaatctgcgcacacgttacacctttttcaccaacattcccctcttgtgcactgcatgaccaacgatgtggtgcaaacctttactgccaataccttgctggcgctcggtgcatcgccagcgatggttatcgaaaccgaagaggccagtcagtttgcggctattgctagtgcgttgctgattaacgttggcacgctgacgcagccacgcgcacaggcgatgcgtgccgccgttgagcaagcaaaaagctctcaaaccccctggacgcttgatcctgtagcggtgggtgcactcgattatcgccgccgtttttgtctggaacttctgtctcataagccaaccgccatacgtggtaatgcttcggaaatcatggcattagctggcgttgctaatggtggacggggagtggataccactgacgccgcagctaacgcaatacccgctgcacaaacactggcacgggaaactggcgcaatcgtcgtggtcacaggcgaggtggattatgttaccgatgggcatcgtatcgttggcattcacggtggcgatccgctaatgactaaagtggtaggaactggctgtgcattatcggcggttgttgctgcctgttgtgcgttaccaggcgatatgctggaaaatgtcgcatctgcctgtcactggatgaaacaagccggagagcgcgcagtcgccagaagcgaggggccaggcagttttgttccacatttccttgatgcgctctggcaattgacgcaggaggtgcaggcatga

SEQ ID NO: 54 - DNA, 789 bp, Artificial Sequence
  HTK6 codon optimised
atgcaggttgatctgctgagcagtgcacagagcgcccataccctgcatctgttccatcagcatagcccgctggtgcattgtatgaccaatgatgttgttcagaccttcaccgcaaataccctgctggccctgggcgcaagtccggcaatggtgattgaaaccgaagaagcaagtcagttcgccgccattgcaagcgccctgctgattaatgttggtaccctgacccagccgcgcgcccaggcaatgcgtgcagcagtggaacaggcaaaaagcagtcagaccccgtggaccctggaccctgttgccgtgggtgcactggattatcgtcgccgcttctgtctggaactgctgagtcataaaccgaccgcaattcgtggtaatgccagcgaaattatggccctggccggcgtggcaaatggcggtcgtggcgttgataccaccgatgccgcagccaatgccattccggcagcacagaccctggcccgcgaaaccggtgcaattgtggttgttaccggtgaagtggattatgtgaccgatggccatcgtattgttggtattcatggcggtgatccgctgatgaccaaagtggtgggtaccggttgcgcactgagtgccgtggtggccgcatgttgtgccctgccgggtgatatgctggaaaatgtggcaagcgcctgccattggatgaaacaggcaggcgaacgcgccgtggcacgtagtgaaggtccgggtagcttcgttccgcacttcctggatgcactgtggcagctgacccaggaagttcaggcctga

SEQ ID NO: 55 - protein, 209 aa, Bacteroides thetaiotaomicron
  HTK7
MVSLQFITHQTDRYTYFESALMALEGGCKWIQLRMKEAPCEEVEAVALQLKPLCKEKEAILLLDDHVELAKKLEVDGVHLGKKDMPIDQARQLLGEAFIIGGTANTFEDVVQHYRAGADYLGIGPFRFTTTKKNLSPVLGLEGYTAILSQMKEANIELPVVAIGGITREDIPAILETGVNGIALSGTILRAEDPAAETRKILNMKRIIK

SEQ ID NO: 56 - DNA, 630 bp, Bacteroides thetaiotaomicron
  HTK7 wild type
atggtcagtctacaatttatcacccaccagaccgatcggtatacttatttcgaatcggcactcatggcacttgaaggaggatgtaagtggattcagctacgcatgaaggaagctccgtgtgaagaggtggaagctgttgccctccaactaaagccgctctgcaaagaaaaagaagcgatcttacttctggatgaccacgtcgaacttgccaaaaagctggaagtggacggagtgcatctgggcaaaaaagacatgccgatagatcaggcacgacaattacttggagaagcatttattatcggaggtacggcaaatacattcgaagatgtcgtacagcactaccgtgccggagcggattacctcggcatcggtcctttccggtttaccactacaaagaaaaacctgagtcctgtactgggactggaaggttataccgctattttatctcagatgaaggaagcgaatatcgaacttccggtagtagccatcggaggaatcacccgtgaggatatacccgccatactcgaaaccggagtgaacggaatcgcgctttcaggaacgattcttcgggcggaggatccggcagcggaaacacgaaagattttgaacatgaaacgtataatcaaataa

SEQ ID NO: 57 - DNA, 630 bp, Artificial Sequence
  HTK7 codon optimised
atggttagcctgcaattcattacccatcagaccgatcgttatacctacttcgaaagcgccctgatggcactggaaggtggttgtaaatggattcagctgcgtatgaaagaagccccgtgtgaagaagtggaagccgttgccctgcaactgaaaccgctgtgtaaagaaaaagaagcaattctgctgctggatgatcatgttgaactggcaaaaaaactggaagttgatggcgtgcatctgggcaaaaaagatatgccgattgatcaggcacgccagctgctgggcgaagccttcattattggtggtaccgccaataccttcgaagatgttgtgcagcattatcgcgcaggtgccgattatctgggtattggcccgttccgcttcaccaccaccaaaaaaaatctgagtccggttctgggtctggaaggctataccgccattctgagtcagatgaaagaagcgaatattgaactgccggtggtggcaattggtggcattacccgcgaagatattccggcaattctggaaaccggcgtgaatggcattgcactgagtggtaccattctgcgcgccgaagatccggcagccgaaaccagaaaaattctgaatatgaaacgcattatcaagtga

SEQ ID NO: 58 - protein, 351 aa, Prochlorococcus marinus
  HTK8
MKNPNIIQPEDLRISQIIDANLDRAREGLRVLEDWARFGLGNEDFVIRIKNFRQILGKNHLEIYKLSRNHIEDQCKGLSHVEQINRNSSSKIISSNSARVQEALRVIEEFSRIHNSKLSKIASEIRYEIYTLEIEILNFNTRKRAQSIISKNNLYSITDPRENLLEIIEKILLGGVKIIQHRFKEGNDKDHLKEAIEINKLCKKYNSLFIVNNRLDIALASKADGVHLGQDDLDIKTVRKLLGASKIIGVSANNSTDINKAVKDGCDYIGVGPVFPTLTKKNKEPLGEEKIKALTKELNIPCFAIGGINKLNISSLKNHGISKVAIVSGLLNSEDPKDEAMIIIKELSHEN

SEQ ID NO: 59 - DNA, 1056 bp, Prochlorococcus marinus
  HTK8 wild type
atgaaaaacccaaacataattcaacctgaagatttacgaatatctcaaattattgacgctaatttagatagagcaagagaaggtctaagggttttggaggactgggccagatttggcttgggtaatgaagattttgttataagaataaaaaacttccgacaaatattaggtaaaaatcatttagaaatttataaattatcaagaaaccatattgaagatcaatgcaaagggttatctcatgtcgaacaaatcaacaggaatagttcctctaaaataataagttctaattctgcaagagttcaagaagcgcttcgagttattgaagaattttcaaggattcataatagtaaactttctaaaatagcttccgagattagatatgaaatttacactttagaaattgaaatattaaatttcaatactcgtaagagagcacaatcaataattagtaaaaacaatttatattcgataacagacccaagagaaaacttattagaaataattgaaaaaatattattaggaggggtaaaaataattcagcatcgatttaaagaaggtaatgataaagaccatctcaaagaggcaattgaaataaataaattatgtaagaaatataattctttgttcatcgttaataacagattagatatagcattggcatcaaaggcagatggtgttcatcttggtcaagacgacctcgatataaaaacagtaagaaaattacttggtgcctcaaaaatcattggagtttcagccaacaattcaactgacatcaataaggctgtaaaagatggatgcgattacattggagtcgggccagtttttccaactttgacaaagaaaaataaagaacctctcggtgaagagaaaattaaggccttaacaaaagaactaaatattccttgttttgcaataggaggaattaataaattaaatatctcttctctaaaaaatcatggaattagtaaggttgcaatagtttctgggctgctaaattcagaagatccaaaagatgaagctatgattatcataaaagaattatcccatgaaaattag

SEQ ID NO: 60 - DNA, 1056 bp, Artificial Sequence
  HTK8 codon optimised
atgaagaacccgaatattatccagccggaagatctgcgcattagtcagattattgatgcaaatctggatcgtgcccgtgaaggcctgcgtgtgctggaagattgggcccgcttcggtctgggcaatgaagacttcgttattcgcattaaaaacttccgccagattctgggtaaaaatcatctggaaatctataaactgagccgcaatcatattgaagatcagtgtaaaggcctgagtcatgttgaacagattaatcgtaatagcagcagtaaaattatcagcagtaatagcgcacgtgtgcaggaagcactgcgtgtgattgaagagttcagccgcattcataatagcaaactgagcaaaattgcaagcgaaattcgttatgaaatctataccctggaaattgaaatcctgaacttcaatacccgcaaacgcgcccagagcattattagcaaaaataatctgtacagcatcaccgatccgcgtgaaaatctgctggaaattattgaaaaaatcctgctgggtggtgtgaaaattattcagcatcgcttcaaagaaggtaatgataaagatcatctgaaggaagcaattgaaattaataagctgtgcaaaaagtacaacagtctgttcattgttaacaatcgcctggatattgccctggcaagcaaagccgatggcgttcatctgggccaggatgatctggatattaaaaccgttcgtaaactgctgggtgccagtaaaattattggtgttagtgcaaataacagcaccgatattaataaagcagttaaagatggttgcgattatattggcgtgggtccggtgttcccgaccctgaccaaaaaaaataaagaaccgctgggcgaagaaaaaattaaagccctgaccaaagaactgaatattccgtgcttcgcaattggcggcattaataaactgaatattagcagtctgaagaaccacggtattagcaaagttgccattgttagcggcctgctgaatagtgaagatccgaaagatgaagccatgattattattaaagagctgagccatgaaaactga

SEQ ID NO: 61 - protein, 462 aa, Peptoniphilus sp.
  HTK9
MKIKCNLRKLRDKAPLVHIISNGVTRGRVADFVLSTGASPMMAEYSKEVSEITKKASALVLNMGMLNEDKIEAIKIAGKTAKENNIPTVLDPVGVASSKIRRDLAEYLLDNFKFNVIRGNFNEINYLVGGQAFAGIDSRDKNLSEEDFKELAVKMNEKSGATVVVSGKYEVIANSHMLISIPGGHDDFRKISGLGDMESAMIGSLLATPMSNLKACAISAIFLRQLAREVIVDGSIKAQDIISKVQKLEEISGEIEILSPSYKFKKPSLYGISDGNDLMKIKNATRAGMKIYQLRDKTSEEALLGEKILKIKKEIEEDCLFILNDNLKLAKEYKTSLHLGQDDEEISLARRILGRDPIIGATAKTPELAIEAENMGASYLGSGAFFETETKRDASMINLEIYEEIRDSILIPAFPIGGINLENLDLFKGVEIPGLCMSSGIFSLEENEVEKNVREIIKKLGD

SEQ ID NO: 62 - DNA, 1389 bp, Peptoniphilus sp.
  HTK9 wild type
atgaaaattaaatgcaatttaagaaaactaagggacaaggctcccttggtacatattatttccaatggagttaccaggggaagggtagctgactttgtcctctctacaggtgcgagtccaatgatggcagagtattcaaaagaagtatctgaaatcacaaaaaaagcttcagccctagttttaaatatgggaatgttaaatgaagataaaattgaagcaattaaaattgcagggaaaacagcaaaagaaaataatattcccactgttcttgatcctgttggtgttgcttctagcaagataagaagagatttagcagaatatcttcttgataattttaagttcaatgtcattaggggaaattttaatgaaatcaattatttggttgggggtcaagcctttgctggcatagattcaagagacaaaaatttatcggaagaggactttaaagaacttgcagtgaagatgaatgaaaaaagtggagcaactgtagttgtaagtggcaagtatgaagtaattgctaactctcacatgcttatttctatacctggtggtcatgatgattttagaaaaataagtgggcttggggatatggaatcagcgatgataggctcacttttggcgacacctatgtcaaacctaaaggcttgtgccatttcggcaatatttttaagacagcttgcaagagaagtaatagttgatggaagtataaaggctcaagacataataagtaaagttcaaaagcttgaggaaataagtggagaaattgaaattttatcgccaagctataaatttaaaaagccaagtttatatggaatttctgatggtaatgatttgatgaaaataaaaaatgccacaagagctgggatgaaaatttaccagctaagagataagacatcagaggaagctttgcttggagaaaaaattttaaagataaaaaaggaaattgaagaagattgtctcttcatcttaaacgataatttaaaacttgcaaaagaatataagacatcccttcacctgggacaagatgatgaagagatttctcttgcaagaagaattctgggtagagacccaataattggagcaactgcaaaaactcctgagcttgccatagaagcagaaaatatgggagcatcctaccttggttccggtgccttttttgaaacggaaactaagagggatgcatcaatgattaatctagaaatttacgaggaaataagagatagcattttaataccagccttcccaataggtggtataaatttggagaacctagacttgtttaagggggtagagatacctggcctttgtatgtctagtggaattttttcccttgaagagaatgaagtggagaaaaatgtaagagaaataataaaaaagttaggtgattaa

SEQ ID NO: 63 - DNA, 1389 bp, Artificial Sequence
  HTK9 codon optimised
atgaagatcaagtgcaatctgcgtaaactgcgtgataaagccccgctggttcatattattagtaatggcgttacccgtggtcgcgtggcagacttcgtgctgagtaccggtgcaagcccgatgatggcagaatatagtaaagaagtgagtgaaattaccaagaaagcaagcgccctggttctgaatatgggtatgctgaatgaagataaaatcgaagccattaaaatcgcaggcaaaaccgccaaagaaaataatattccgaccgttctggaccctgttggcgttgcaagcagcaaaattcgtcgtgatctggccgaatatctgctggataacttcaaattcaatgttattcgcggcaacttcaatgaaattaattatctggtgggtggtcaggcattcgccggtattgatagccgcgataaaaatctgagtgaagaagacttcaaagaactggccgtgaaaatgaatgaaaaaagcggtgccaccgttgttgttagtggtaaatatgaagttatcgcaaatagccacatgctgattagtattccgggcggtcatgatgacttccgcaaaattagtggtctgggcgatatggaaagtgcaatgattggcagtctgctggcaaccccgatgagcaatctgaaagcatgtgcaattagcgcaatcttcctgcgtcagctggcacgcgaagtgattgttgatggtagtattaaagcccaggatattattagtaaggttcagaaactggaagaaattagcggtgaaattgaaattctgagcccgagctataaattcaaaaaaccgagcctgtatggcattagtgatggcaatgatctgatgaaaattaaaaacgccacccgtgcaggtatgaaaatctatcagctgcgtgataagaccagtgaagaagcactgctgggcgaaaaaattctgaaaattaaaaaggagatcgaggaagattgcctgttcattctgaatgataatctgaaactggccaaagaatataaaaccagtctgcatctgggccaggatgatgaagaaattagtctggcacgccgtattctgggccgcgatccgattattggcgcaaccgcaaaaacacctgaactggcaattgaagcagaaaatatgggcgccagctatctgggcagcggtgcattcttcgaaaccgaaaccaaacgtgatgccagcatgattaatctggaaatctatgaagaaatccgtgatagcattctgattccggccttcccgattggtggtattaatctggagaatctggatctgttcaaaggtgtggaaattccgggcctgtgtatgagtagtggtatcttcagcctggaagaaaatgaagtggaaaaaaatgtgcgcgaaattattaaaaagctgggtgattga

SEQ ID NO: 64 - protein, 298 aa, Clostridium gasigenes
  HTK10
MKISIEALTEVLNLQKEKQPLIHCISSMVTMNDLAQGILSYNGKPIMAPGIDEVGEITASANALLINLGTLDSSRVEAMEKSIRIASKKNKPIVLDAIGVDISFFRREIALVFLTRYKIDVIKGNVSEIKALLEKKPKKNKEHKEIIESKEQNRNNENEEFVKNTIKDDYEIREQMREFSKKYKSILIATGNEDYITDGFSEFFINNGNNEFDRVVGVDSLLGGLISVGVAVARTNAEKVQAVLIAIMTMGVSKELAYEKMDKKQGLISLKNSLIDEISLINNKKLEAMGKISYIFKR

SEQ ID NO: 65 - DNA, 897 bp, Clostridium gasigenes
  HTK10 wild type
atgaaaataagtatagaggcattgactgaagttctaaatttacagaaggaaaagcaacctcttatacattgtatttcaagtatggttactatgaatgatttagcacagggaattttaagttataatgggaaaccaattatggcacctggcattgatgaagtaggagaaataacagctagcgctaatgcgttactaattaatcttggaacattagatagtagtagggttgaggctatggagaaatctattagaatagcttcaaaaaaaaataaacctatagttttagatgctataggagttgatatttctttttttaggagagaaatagctttggtgttcttaaccagatataaaatagatgttataaagggcaatgtatcagaaattaaagcattactagagaaaaagcctaagaaaaataaagaacacaaagaaattatagaatctaaagaacaaaatagaaataatgaaaatgaagaatttgttaaaaatactataaaagatgattatgaaattagagaacaaatgagagagttttctaaaaaatataaaagcatattaatagcaacaggaaatgaagattatataactgatggatttagtgagttttttattaataatggaaataatgaatttgatagagtagttggagtggatagtttattaggtgggttaatttcagtgggggtggcagtagccagaacaaatgcagaaaaagtacaagccgtgctaattgcaataatgactatgggtgtaagcaaagaactagcttatgaaaagatggacaaaaaacagggactaatatctttaaaaaactctttaatagatgaaatttcccttataaataataaaaaattagaagctatggggaaaatatcatatatatttaaaaggtag

SEQ ID NO: 66 - DNA, 897 bp, Artificial Sequence
  HTK10 codon optimised
atgaagatcagtatcgaagccctgaccgaagttctgaatctgcaaaaagaaaaacagccgctgattcattgcattagcagcatggttaccatgaatgatctggcccagggtattctgagttataatggcaaaccgattatggcccctggtattgatgaagttggcgaaattaccgcaagcgccaatgccctgctgattaatctgggcaccctggatagtagtcgtgttgaagcaatggaaaaaagtattcgtattgcaagcaaaaagaacaaaccgattgttctggatgcaattggcgtggatattagcttcttccgtcgtgaaattgccctggtgttcctgacccgctataaaattgatgtgattaaaggtaacgtgagcgaaattaaagcactgctggaaaaaaaaccgaaaaaaaataaggagcacaaggaaattatcgaaagtaaagaacagaaccgtaataatgaaaacgaagagttcgttaaaaacaccattaaagatgattacgagatccgtgaacagatgcgtgagttcagtaaaaaatataaaagcatcctgatcgcaaccggtaatgaagattatattaccgatggcttcagtgagttcttcattaataatggtaacaacgagttcgatcgtgttgttggtgtggatagtctgctgggtggcctgattagtgtgggcgtggcagttgcacgtaccaatgcagaaaaagtgcaggcagtgctgattgcaattatgacaatgggtgtgagtaaagaactggcctatgaaaaaatggataaaaaacagggtctgattagtctgaaaaatagtctgattgatgagattagcctgattaataataagaagctggaagcaatgggcaaaattagctatatcttcaaacgttga

SEQ ID NO: 67 - protein, 264 aa, Thermanaerovibrio acidaminovorans
  HTK11
MRVSHLASEVARLSPLVYHVTNWVSGPLSARVCYALGGRALMTTHPEEALEAARMSQALLLNLGTPTEDRVVSIRRALDGAGDRPALLDPVGVGSFPGRLDLAMEILSRGISILKGNGAEISALLGEGKGQRGVDSDLPGPPLGVRRLAEDHRCCAVMTGEEDHVALGVSWGLVRLRGREVRGAVPVPGLGCALGSAMACALGVGADPFSAALWGCALFKGALRRALGACCGPGSLVEALIDQLHRARTGELDGENVEVIRADG

SEQ ID NO: 68 - DNA, 795 bp, Thermanaerovibrio acidaminovorans
  HTK11 wild type
ttgagggtctcccacctggcatcggaggtggcccggctatcccctctggtctatcacgtcaccaactgggtgtcgggccccctcagcgcccgggtctgttacgccctggggggcagggcgctgatgaccacccatccggaggaggccctggaggcggcccggatgtcccaggcgctgctgctcaacctggggacccccacggaggaccgggtcgtgtccatccggcgggctctggacggggcgggggatcggccggcgctgttggatccggtgggggtcgggtccttccctgggcgcctggacctggctatggagatcctctcccgggggatctcgatcctcaaggggaacggggcggagatctccgccctgcttggggaggggaagggacagcggggggtggactcggacctgccgggaccgccccttggggtccggaggctggcggaggaccaccggtgttgcgcggtcatgaccggggaggaggaccacgtggccctaggggtgagctgggggctggtgaggctccgggggagggaggttcgaggggcggtgccggtgcccgggcttggatgcgccctgggtagcgccatggcctgcgccctgggggtgggggcggaccccttctccgccgccctgtggggctgcgccctcttcaagggggccctccggagggcccttggggcctgctgtggccccggcagcctggtggaggccctcatagaccagctacaccgggccaggaccggggagctggatggggagaacgtggaggtgatccgggcagatggatga

SEQ ID NO: 69 - DNA, 795 bp, Artificial Sequence
  HTK11 codon optimised
atgcgtgtgagtcatctggccagtgaagtggcacgtctgagcccgctggtgtatcatgtgaccaattgggtgagcggtccgctgagcgcccgcgtgtgttatgccctgggtggccgcgcactgatgaccacccatccggaagaagcactggaagcagcacgtatgagccaggcactgctgctgaatctgggtaccccgaccgaagatcgcgtggtgagtattcgtcgtgccctggatggtgcaggtgatcgtccggcactgctggaccctgttggcgttggtagcttccctggtcgtctggatctggcaatggaaattctgagtcgtggcattagtattctgaaaggtaatggcgccgaaattagcgcactgctgggtgaaggtaaaggccagcgtggcgttgatagtgatctgccgggtccgccgctgggcgtgagaagactggcagaagatcatcgttgctgcgccgtgatgaccggcgaagaagatcatgttgcactgggcgtgagctggggtctggttcgtctgcgtggtcgtgaagttcgtggtgcagttccggttccgggcctgggctgtgcactgggtagtgcaatggcttgtgcactgggcgttggtgccgatccgttcagcgcagccctgtggggttgtgcactgttcaaaggcgccctgcgccgtgccctgggtgcttgctgtggccctggtagcctggtggaagccctgattgatcagctgcatcgcgcacgtaccggtgaactggatggcgaaaatgtggaagtgattcgtgccgatggctga

SEQ ID NO: 70 - protein, 223 aa, Dictyoglomus turgidum
  HTK12
MNKKEKLELLKDFNLYCLTCEEYSIGRKNIDVVREILEAGVKIIQYREKKKPMREKYHEVVKIRDLTAKYNALLIVNDHLDLTKIVEADGVHIGQEDYPIEVAKEFLGENFIIGLTTHTKEQVMEALRKGADYIGLGPIFPSYTKEKPHPPIGIEILDWAIKNISIPVVAIGGIKESNIHEILNLGAKCIAMVTEIVSSPNIYEKTRKIIHILEGYKNGKYIA

SEQ ID NO: 71 - DNA, 672 bp, Dictyoglomus turgidum
  HTK12 wild type
atgaataaaaaagaaaaattagagctattaaaagatttcaatctatactgcctaacctgtgaagaatattccataggaaggaagaatattgatgtggtaagagaaattcttgaagcaggggtaaagattatacaataccgagaaaagaaaaaacctatgagagaaaaatatcatgaagtcgtaaaaataagagatttaactgctaagtataatgctttacttatagtaaatgatcacctagatcttacaaaaatagttgaagcagatggggtacatattggacaagaagattatcctatagaggttgctaaagagttcttaggggaaaacttcattataggtctcactactcatacaaaggaacaagttatggaggcattacgaaaaggagctgattatattggacttggacctatatttccaagttatacaaaagaaaaacctcacccaccaatcggaatagagattcttgattgggctatcaagaatatcagtattcccgttgttgccattgggggtataaaagaatccaatatccatgagatactaaatctgggagccaaatgtatagctatggtgactgagattgtttcttctccaaatatttatgagaaaacgagaaaaatcatccacatattggagggatataaaaatggaaaatacattgcttga

SEQ ID NO: 72 - DNA, 672 bp, Artificial Sequence
  HTK12 codon optimised
atgaacaagaaggaaaagctggaactgctgaaagacttcaatctgtattgtctgacctgtgaagaatatagtattggccgtaaaaatatcgatgttgtgcgcgaaattctggaagcaggcgtgaaaattattcagtatcgtgaaaaaaagaagccgatgcgcgaaaaatatcatgaagttgtgaaaattcgcgatctgaccgcaaaatataatgcactgctgattgtgaatgatcatctggatctgaccaaaattgttgaagccgatggcgtgcatattggtcaggaagattatccgattgaagtggcaaaagagttcctgggcgaaaacttcattattggtctgaccacccataccaaagaacaggtgatggaagccctgcgtaaaggcgcagattatattggcctgggtccgatcttcccgagttataccaaagaaaaaccgcatccgccgattggcattgaaattctggattgggcaattaaaaacattagcattccggttgtggcaattggtggtattaaagaaagcaatattcacgaaatcctgaatctgggtgcaaaatgtattgcaatggttaccgaaattgtgagtagtccgaatatctatgaaaaaaccagaaaaatcatccacatcctggaaggctataaaaatggcaaatatattgcctga

SEQ ID NO: 73 - protein, 565 aa, Aspergillus niger
  IP1
MSSYGGGGGYQRDSYRSRNGGGGGGYGNGNGYSNGGGYGGGGGGGGYGGGGYGGGGYGGGGYGGRGGGAGGAGGDRMSNLGAGLKKQEWDLDSLPKFEKSFYKEHADVAERSQRDVDEFRKKHEMAVQGRNVPRPVETFDEAGFPQYVLSEVKAQGFDRPTAIQSQGWPMALSGRDVVGIAETGSGKTLTYCLPAIVHINAQPLLAPGDGPIVLILAPTRELAVQIQAEISKFGKSSRIRNTCVYGGVPKGPQIRDLSRGVEVCIATPGRLIDMLEAGRTNLRRVTYLVLDEADRMLDMGFEPQIRKIISQIRPDRQTCMWSATWPKEVRQLASDFLNDYIQVNIGSMDLSANHRITQIVEVVSDFEKRDKMIKHLEKIMENRANKCLIFTGTKRIADEITRFLRQDGWPALSIHGDKQQQERDWVLNEFKTGKSPIMVATDVASRGIDVRDITHVLNYDYPNNSEDYVHRIGRTGRAGAKGTAITFFTTDNSKQARDLVTILTEAKQQIDPRLAEMVRYSGGGGHGHGGYGRWGGRGGGRGGGRGRGNHFTASNAAPLGGNRRW

SEQ ID NO: 74 - DNA, 1698 bp, Aspergillus niger
  IP1 wild type
atgtcttcctacggcggcggcggcggctaccagcgcgactcctaccgctccagaaacggtggcggcggcggcggctacggtaacggtaacggttactccaacggcggaggctacggtggtggtggtggtggtggtggttacggcggtggtggctatggcggcggcggctacggcggcggcggctatggtggcagaggtggtggtgccggcggtgctggcggagaccgcatgtccaacctgggcgccggtctgaagaagcaggaatgggatcttgactccctgcccaagttcgagaagtccttctacaaggaacacgccgatgtcgccgagcgctctcagcgtgatgttgacgagttccgtaagaagcacgagatggctgttcagggaagaaacgtccctcgccctgtcgagaccttcgacgaggccggtttccctcaatacgttctcagcgaggtcaaggcccagggcttcgaccgccctaccgctattcagtctcagggttggcccatggccctctctggtcgcgacgttgtcggtatcgctgagacgggttccggaaagaccctgacctactgtcttcctgccattgttcacatcaacgcccagcccctcctcgcccccggtgacggccccattgtccttatcctcgcccccacccgtgaattggccgttcagattcaagccgaaatctccaagttcggaaagtcttcccgtatccgcaacacctgtgtctacggtggtgtccccaagggtcctcagatccgtgacctgagccgtggtgtggaagtctgcattgcgactcccggtcgtctgattgacatgctcgaggctggtcgcaccaaccttcgtcgtgtcacctacctcgttctggatgaggccgatcgcatgctggacatgggtttcgagccccagatccgcaagatcatctcccagattcgccctgaccgtcagacctgcatgtggtccgctacatggcccaaggaggtccgtcagcttgcgtctgacttcctcaacgactacatccaggttaacattggttccatggatctgtcggccaaccaccgtatcactcagatcgtcgaggtcgtctcggacttcgagaagcgcgacaagatgatcaagcacctcgagaagatcatggagaaccgtgccaacaagtgccttatcttcaccggcaccaagcgcatcgctgacgaaatcactcgcttcctccgccaggacggatggccggcactttctattcacggtgataagcaacagcaagaaagagattgggtcttgaacgagttcaagacgggcaagagcccaatcatggtggctactgatgtggcttcccgtggtatcgatgtgcgcgacatcacacacgttctcaactatgactaccccaacaactcggaggactacgttcaccgtattggtagaactggtcgtgccggtgctaagggtaccgccatcaccttctttaccactgacaactccaagcaggctcgtgacttggtcaccattctcactgaggccaagcagcagattgacccccgtctcgccgagatggtccgctacagtggcggcggtggtcatggccacggtggctatggccgctggggtggccgtggtggtggccgtggtggtggccgtggccgcggcaaccacttcactgcttccaatgctgctcctcttggtggcaaccgtcgctggtaa

SEQ ID NO: 75 - DNA, 1698 bp, Artificial Sequence
  IP1 codon optimised
atgagtagttacggtggcggtggcggttatcagcgcgatagttatcgtagccgcaatggcggcggtggcggcggttatggtaatggcaatggttatagtaatggcggtggctatggtggtggcggtggtggcggcggatatggtggtggtggttatggcggtggcggatatggcggcggtggttatggtggccgtggcggtggcgccggtggtgcaggtggtgatcgcatgagcaatctgggcgccggcctgaaaaaacaggaatgggatctggatagcctgccgaaattcgaaaaatcattctataaagagcacgcagatgttgccgaacgtagtcagcgcgatgttgatgagttccgcaaaaaacatgaaatggcagttcagggccgtaatgtgccgcgcccggtggaaaccttcgatgaagcaggcttcccgcagtatgttctgagcgaagtgaaagcacagggcttcgatcgtccgaccgccattcagagtcagggttggccgatggccctgagtggccgcgatgttgtgggcattgcagaaaccggtagtggcaaaaccttaacctattgtctgccggcaattgtgcatattaatgcacagccgctgctggcaccgggtgatggtccgattgttctgattctggccccgacccgtgaactggccgttcagattcaggccgaaattagcaaattcggcaaaagcagccgtattcgcaatacctgcgtgtatggtggtgttccgaaaggtccgcagattcgcgatctgagtcgtggtgtggaagtgtgtattgcaacccctggtcgcctgattgatatgctggaagcaggccgcaccaatctgcgtcgcgttacctatctggttctggatgaagccgatcgtatgctggatatgggcttcgaaccgcagattcgtaaaattattagtcagattcgtccggatcgtcagacctgcatgtggagcgcaacctggccgaaagaagtgcgtcagctggcaagtgacttcctgaatgattatattcaggtgaatatcggtagtatggatctgagcgcaaatcatcgcattacccagattgtggaagttgttagcgacttcgaaaaacgcgataaaatgattaaacacctggaaaaaatcatggaaaaccgtgcaaataaatgcctgatcttcaccggtaccaaacgcattgccgatgaaattacccgcttcctgcgtcaggatggttggccggccctgagtattcatggtgataaacagcagcaggaacgtgattgggtgctgaatgagttcaaaaccggcaaaagtccgattatggttgccaccgatgttgcaagtcgcggtattgatgtgcgcgatattacccatgtgctgaattatgattatccgaataatagtgaggactatgttcatcgtattggtcgcaccggccgtgccggcgcaaaaggtaccgccattaccttcttcaccaccgataatagcaaacaggcccgcgatctggttaccattctgaccgaagcaaaacagcagattgatccgcgtctggccgaaatggttcgctatagcggcggcggtggacatggccacggtggttatggacgctggggtggccgtggtggcggccgtggtggtggtagaggtcgcggtaatcacttcaccgcaagtaatgcagccccgctgggtggtaatcgtcgttggtga

SEQ ID NO: 76 - protein, 266 aa, Streptomyces viridochromogenes
  IP2
MTPDFLAIKVGGSLFSRKDEPGSLDDDAVTRFARNFARLAETYRGRMVLISGGGAFGHGAIRDHDSTHAFSLAGLTEATFEVKKRWAEKLRGIGVDAFPLQLAAMCTLRNGIPQLRSEVLRDVLDHGALPVLAGDALFDEHGKLWAFSSDRVPEVLLPMVEGRLRVVTLTDVDGIVTDGAGGDTILPEVDARSPEQAYAALWGSSEWDATGAMHTKLDALVTCARRGAECFIMRGDPGSDLEFLTAPFSSWPAHVRSTRITTTASA

SEQ ID NO: 77 - DNA, 801 bp, Streptomyces viridochromogenes
  IP2 wild type
atgacgcccgatttcttggccatcaaggttggcggcagcctgttctcccgcaaggacgaacccggcagcctggacgacgacgcggtgacgcgcttcgccaggaacttcgcccggctcgccgagacctaccggggccggatggttctcatcagcggcggcggcgccttcggccacggggccatccgtgaccacgacagcacgcacgcgttctccctcgccggcctgaccgaggccaccttcgaggtgaagaagcggtgggccgagaagctccgcgggatcggcgtggacgccttcccgctccagctggcggccatgtgcacgctccgcaacggcataccgcagctccggtccgaggtcctccgggacgtcctcgaccacggcgcgctgcccgtcctcgccggcgacgccctgttcgacgagcacggaaagctgtgggcgttctccagcgaccgcgtccccgaggtcctcctgcccatggtcgaggggcgcctccgggtcgtcaccctgaccgacgtcgacggcatcgtgaccgacggcgccggcggcgacacgatcctgcccgaggtcgacgcccggtcccccgagcaggcgtacgccgcgctctggggcagcagcgaatgggacgccaccggcgccatgcacaccaagctcgacgcactggtcacctgcgcccgccgcggtgccgagtgcttcatcatgcggggcgaccccggcagcgacctggagttcctgaccgcccccttctcctcctggccggcgcacgtgcggtccaccaggatcaccacgactgcttctgcgtaa

SEQ ID NO: 78 - DNA, 801 bp, Artificial Sequence
  IP2 codon optimised
atgaccccggacttcctggccattaaagtgggtggtagtctgttcagccgcaaagatgaaccgggcagcctggatgatgatgcagtgacccgcttcgcccgtaacttcgcacgtctggccgaaacctatcgcggccgtatggtgctgattagtggtggtggtgccttcggtcatggtgcaattcgtgatcatgatagcacccatgccttcagtctggcaggtctgaccgaagcaaccttcgaagtgaaaaaacgctgggcagaaaaactgcgcggtattggcgtggatgcattcccgctgcaactggccgcaatgtgcaccctgcgtaatggtattccgcagctgcgtagcgaagtgctgcgtgatgttctggatcatggcgcactgccggttctggcaggcgatgccctgttcgatgaacatggtaaactgtgggcattcagcagcgatcgcgttccggaagttctgctgccgatggttgaaggtcgtctgcgtgtggtgaccctgaccgatgttgatggtattgtgaccgatggcgccggcggtgataccattctgccggaagttgatgcacgcagtccggaacaggcatacgctgccctgtggggtagtagcgaatgggatgcaaccggtgcaatgcataccaaactggatgcactggtgacctgtgcacgccgtggcgcagaatgcttcattatgcgtggtgatccgggcagtgatctggagttcctgaccgcaccgttcagcagctggccggcccatgtgcgtagtacccgcattaccaccaccgcaagtgcctga

SEQ ID NO: 79 - protein, 276 aa, Pseudoalteromonas byunsanensis
  IP3
MVTSADLLIVKVGGSLFSDKMTDRQLDEQALQTYAQLMASLYRNAPGHVIMISGGGSYGHHAVRCIDESDELSLLSLGMINFELKCVWHEQLKRCGIKSYPLHLASMTSCVNRENFDSSAKFVNKLLYAKYLPLVTGDALLNEQGVLEVVGSDYVAGAFKDLEFNKIRIVIMTDVPGVLQKSATGQFETIKEIDQFNDPAQWLWETPEGDTSGAMQGKIAALLKQAKWGAECFIVEGQACLKNPRWLFEEHSDWPEEFKSTQIIWRENNAKDTEGY

SEQ ID NO: 80 - DNA, 831 bp, Pseudoalteromonas byunsanensis
  IP3 wild type
atggtgaccagcgctgatttattaattgtaaaagtgggtggtagtcttttttctgacaaaatgactgacagacaactggatgaacaagccctgcaaacatatgcgcaattgatggcctctttgtatcgcaatgcaccgggtcacgtgattatgataagcggtggcggctcttatggacaccatgctgtgcgctgtatagatgaaagtgatgagctgtcgctactatctttaggcatgattaactttgagcttaagtgcgtgtggcatgaacaattaaaacgctgtgggattaagtcttaccctttgcatttagcttctatgacatcctgtgtgaatagagaaaactttgactcatccgcaaagtttgtcaataagttgttgtatgcaaagtacttgcccctagttacaggagatgcattgcttaatgaacaaggggtgttagaagttgtgggcagcgattatgtggctggcgcctttaaagaccttgagtttaacaaaataagaatcgtgatcatgaccgatgtaccgggtgtgctgcaaaagagtgctactggtcaatttgaaacgattaaagaaatagaccagtttaatgacccagctcagtggctatgggagacaccagaaggggacacatcaggtgctatgcaaggcaaaattgcagccttacttaagcaagccaaatggggcgctgagtgctttatcgtagaaggacaagcatgtttgaaaaacccccgatggttatttgaagaacactccgattggcctgaagagtttaagagcacacaaattatttggcgagagaataacgcaaaagacacagaaggatattaa

SEQ ID NO: 81 - DNA, 831 bp, Artificial Sequence
  IP3 codon optimised
atggttaccagtgccgatctgctgattgtgaaagtgggcggtagcctgttcagtgataaaatgaccgatcgtcagctggatgaacaggccctgcaaacctatgcacagctgatggcaagcctgtatcgcaatgcccctggtcatgtgattatgattagcggcggtggcagctatggccatcatgccgttcgttgcattgatgaaagtgatgaactgagcctgctgagtctgggcatgattaacttcgaactgaaatgtgtgtggcatgaacagctgaaacgttgtggtattaaaagttatccgctgcatctggccagcatgaccagctgcgtgaatcgtgaaaacttcgatagtagcgcaaaattcgtgaataaactgctgtatgccaaatatctgccgctggttaccggtgatgccctgctgaatgaacagggcgttctggaagttgtgggcagtgattatgtggcaggtgccttcaaagatctggagttcaataaaattcgcattgttattatgaccgacgttccgggtgtgctgcaaaaaagtgcaaccggtcagttcgaaaccattaaagaaattgatcagttcaacgatccggcccagtggctgtgggaaacacctgaaggcgataccagcggcgcaatgcagggtaaaattgcagccctgctgaaacaggccaaatggggcgccgaatgcttcattgttgaaggtcaggcatgtctgaaaaatccgcgttggctgttcgaagaacatagcgattggccggaagagttcaaaagtacccagattatctggcgcgaaaataatgcaaaagataccgaaggctattga

SEQ ID NO: 82 - protein, 248 aa, Haloferax volcanii
  IP4
MSLVVLKLGGSVVTDKDEPETVDEAGLAAAADAVAPLAESRRVVVVHGGGSFGHHHAAEHGVSSESGSHDARGVRAIHDAMKRLNDAVLDALEERGVAALPVHPLSAGAREADGSLSLPLAATETMLDEGFVPVLHGDVISHAGKGATIVSGDDLVVSLASGLGADRVGLCSTVPGVLDADGDVIPEITAFADAADALGGSDSTDVTGGMAAKVRKLLALGAPAHVFGPEGLSAFVAGESPGTVIRGE

SEQ ID NO: 83 - DNA, 747 bp, Haloferax volcanii
  IP4 wild type
gtgagcctcgtcgtcctcaaactcggcgggagcgtcgtcaccgacaaggacgaaccggagacggtcgacgaggcgggactggcggccgccgcggacgcggttgcgcccctcgctgaatcgcgccgcgtcgtcgtcgtccacggcggcgggagcttcggccaccaccacgccgccgaacacggcgtctcctcggagtccgggagccacgacgcccgcggcgtgcgcgccatccacgacgcgatgaagcgcctcaacgacgccgtcctcgacgccctcgaagagcgcggcgtcgcggccctgccggtccacccgctttcggccggcgcgcgcgaggccgacggctcgctgtcgcttccgctcgcggcgaccgagacgatgctcgacgagggcttcgtcccggtcctccacggagatgtcatctcgcacgcgggcaagggcgcgaccatcgtcagcggcgacgacctcgtggtgtcgctcgcgtcggggctcggcgcggaccgcgtcggcctctgttcgaccgtccccggcgtgctcgacgccgacggcgacgtgattcccgagattacggcgttcgcggacgcggccgacgcgctcggcgggtctgactccaccgacgtgaccggcgggatggccgcgaaggtgcgaaaactgctcgcgctcggcgcgccggcgcacgtcttcggccccgagggactgtcggcgttcgtcgccggcgagtcgccgggaaccgtcatccgcggagagtag

SEQ ID NO: 84 - DNA, 747 bp, Artificial Sequence
  IP4 codon optimised
atgagtctggtggtgctgaaactgggcggcagtgtggtgaccgataaagatgaaccggaaaccgtggatgaagccggcctggcagcagccgcagatgcagttgcaccgctggccgaaagccgccgtgttgtggtggttcatggcggcggcagcttcggtcatcatcatgccgccgaacatggtgtgagcagtgaaagcggtagtcatgatgcccgtggcgtgcgcgccattcatgatgcaatgaaacgcctgaatgatgccgtgctggatgcactggaagaacgcggtgttgccgcactgccggttcatccgctgagtgccggcgcccgtgaagccgatggtagcctgagcctgccgctggcagcaaccgaaaccatgctggatgaaggcttcgttccggttctgcatggtgatgtgattagccatgcaggtaaaggtgccaccattgtgagtggcgatgatctggtggttagcctggccagtggtctgggcgcagatcgtgtgggtctgtgtagtaccgtgccgggtgtgctggatgcggatggcgatgtgattccggaaattaccgccttcgcagatgccgcagatgccctgggcggtagtgatagcaccgatgtgaccggtggcatggcagcaaaagttcgcaaactgctggccctgggcgccccggcacatgtgttcggtccggaaggcctgagcgccttcgtggcaggcgaaagccctggtaccgttattcgcggcgaatga

SEQ ID NO: 85 - protein, 266 aa, Methanothermobacter thermautotrophicus
  IP5
MIILKLGGSVITRKDSEEPAIDRDNLERIASEIGNASPSSLMIVHGAGSFGHPFAGEYRIGSEIENEEDLRRRRFGFALTQNWVKKLNSHVCDALLAEGIPAVSMQPSAFIRAHAGRISHADISLIRSYLEEGMVPVVYGDVVLDSDRRLKFSVISGDQLINHFSLRLMPERVILGTDVDGVYTRNPKKHPDARLLDVIGSLDDLESLDGTLNTDVTGGMVGKIRELLLLAEKGVESEIINAAVPGNIERALLGEEVRGTRITGKH

SEQ ID NO: 86 - DNA, 801 bp, Methanothermobacter thermautotrophicus
  IP5 wild type
atgatcattctcaagcttggtggaagtgtaattaccaggaaggactctgaggaacctgcaatagacagggataaccttgaaaggatagcctcagagatagggaacgcttcgccatcatcattgatgatagtgcacggcgcagggtcctttggccacccatttgcaggtgagtacaggataggctcggagatagagaatgaggaggacctcaggcgccggaggtttggatttgcactgacccagaactgggttaaaaagcttaacagccatgtatgcgacgcactccttgctgagggaattccagcagtttcaatgcagccatcagctttcataagggcccatgctggccgcataagccacgcggatatctcactgatcagatcctaccttgaggagggtatggtaccggtggtctacggtgacgttgtacttgactcagacaggaggttgaaattttctgtcatatcaggagaccagctgataaaccacttctccctgaggctgatgccggagagggtcatactcgggacagatgtggacggggtatacaccaggaaccctaagaagcaccccgatgcaaggctccttgatgttataggatcactcgatgaccttgaatcccttgacgggacacttaacactgatgtgacgggtggaatggtcggtaagataagggaactccttctgcttgcagagaagggtgtggaatctgaaataattaatgctgcagtgcccggaaatattgagagggccctcctgggagaggaggtacggggcacaagaatcacagggaaacattga

SEQ ID NO: 87 - DNA, 801 bp, Artificial Sequence
  IP5 codon optimised
atgatcatcctgaaactgggcggtagcgtgattacccgcaaagatagcgaagaaccggcaattgatcgtgataatctggaacgtattgcaagcgaaattggtaatgcaagcccgagtagcctgatgattgtgcatggtgccggtagcttcggtcatccgttcgccggtgaatatcgcattggcagcgaaattgaaaatgaagaagatctgcgccgtcgccgcttcggcttcgccttaacccagaattgggtgaaaaaactgaatagccatgtgtgtgatgcactgctggcagaaggtattccggccgttagtatgcagccgagtgccttcattcgcgcccatgcaggtcgcattagccatgccgatattagcctgattcgtagctatctggaagaaggcatggttccggtggtgtatggtgatgtggttctggatagcgatcgtcgcctgaaattcagcgtgattagcggtgatcagctgattaatcacttcagcctgcgcctgatgccggaacgcgttattctgggtaccgatgtggatggcgtgtatacccgcaatccgaaaaaacatccggatgcccgtctgctggatgttattggtagtctggatgatctggaaagtctggatggcaccctgaataccgatgttaccggtggcatggtgggcaaaattcgtgaactgctgctgctggcagagaaaggtgttgaaagcgaaattattaatgccgcagtgccgggtaatattgaacgcgccctgctgggtgaagaagtgcgtggcacccgcattaccggtaaacattga

SEQ ID NO: 88 - protein, 260 aa, Methanocaldococcus jannaschii
  IP6
MLTILKLGGSILSDKNVPYSIKWDNLERIAMEIKNALDYYKNQNKEIKLILVHGGGAFGHPVAKKYLKIEDGKKIFINMEKGFWEIQRAMRRFNNIIIDTLQSYDIPAVSIQPSSFVVFGDKLIFDTSAIKEMLKRNLVPVIHGDIVIDDKNGYRIISGDDIVPYLANELKADLILYATDVDGVLIDNKPIKRIDKNNIYKILNYLSGSNSIDVTGGMKYKIDMIRKNKCRGFVFNGNKANNIYKALLGEVEGTEIDFSE

SEQ ID NO: 89 - DNA, 783 bp, Methanocaldococcus jannaschii
  IP6 wild type
atgctaaccatattaaaattaggagggagtattttatcagataaaaatgttccatactcaataaaatgggacaacttggagagaatagcaatggagataaaaaacgccttggattattataaaaaccaaaataaagagataaaattaatactcgtccatggaggaggagcttttggtcatccagtagctaaaaaatacttaaaaattgaagatggcaaaaaaatatttataaacatggagaaaggattttgggaaattcaaagagcaatgagaagatttaacaacatcattatagacactctacagagctatgacatcccagctgtttctatacaaccatcttcgtttgtcgtttttggggataagttaatttttgatacctctgctataaaagagatgcttaaaaggaatttagttccagttattcatggagatattgtaattgatgataaaaacggctatagaataatttctggagatgacatagttccatatttggcaaatgaattaaaagctgatttaattctctatgctacagatgttgatggtgttttaatagataataagccaataaagaggattgataaaaataatatctataaaattttgaattatttaagtggttctaatagtatagatgttactggtggaatgaagtataagatagacatgattaggaaaaataagtgtagaggttttgtatttaatggaaataaagctaataatatatacaaagctttattgggggaggttgaaggaacagaaattgatttttcagaataa

SEQ ID NO: 90 - DNA, 783 bp, Artificial Sequence
  IP6 codon optimised
atgctgaccattctgaaactgggtggtagcattctgagtgataaaaatgtgccgtatagtattaagtgggataatctggaacgcattgcaatggaaattaaaaatgcactggattattacaagaaccagaataaagaaatcaagctgattctggtgcatggtggtggtgccttcggccatccggttgcaaaaaaatatctgaaaattgaagacggtaagaagatcttcattaatatggaaaagggcttctgggaaattcagcgtgccatgcgtcgcttcaataatattattattgacaccctgcaaagctatgatattccggccgtgagtattcagccgagtagcttcgtggtgttcggcgataaactgatcttcgataccagtgccattaaagaaatgctgaaacgtaatctggtgccggtgattcatggcgatattgtgattgatgataaaaatggttaccgtattatcagtggtgatgatattgttccgtatctggccaatgaactgaaagccgatctgattctgtatgcaaccgatgttgatggcgtgctgattgataataaaccgattaaacgcattgacaaaaacaatatctataagatcctgaactacctgagtggtagcaatagtattgatgtgaccggtggtatgaaatataaaattgatatgatccgcaagaacaagtgtcgcggcttcgtgttcaatggcaataaagcaaataatatctacaaggccctgctgggcgaagttgaaggcaccgaaattgacttcagtgaatga

SEQ ID NO: 91 - protein, 290 aa, Streptomyces regensis
  IP7
MTGPGTRAGEPGLLVLKVGGSLLSDKRHTGETDYTAIDDYAGLLADLVAAFPGRVVLVTGGGALCHPVGLRIKAAKDDPYAAVALTEPAFRMRWAWTTRLRAKGVRAVPLQATSLLEERPDGTRACHTAVVGRLLAQGALPVLSSDCYLTAEGTLRILSSDDVPAVLLDLGLGPVRVVALTDVDGIHTGGPGSPVLAHLDPDDLAAARALFWTDAWDATGAMEGKVEALADSARRGAECVITRGDRTAADLRHLFAPLPDWPRNAPRTLISRRAPTDSALSPALSLENAP

SEQ ID NO: 92 - DNA, 873 bp, Streptomyces regensis
  IP7 wild type
gtgaccggccccggcacgcgggccggtgagccggggctgctcgtcctgaaggtcggcggcagcctcctctccgacaagcggcacaccggcgagaccgactacacggcgatcgacgactacgccgggctgctcgcggacctggtcgccgccttccccggccgggtggtcctggtgaccgggggcggagcgctctgccacccggtcggactgcggatcaaagcggccaaggacgacccctacgccgccgtcgccctgaccgaacccgcgttccggatgcgctgggcgtggacgacccggctgcgcgccaagggcgtgcgggccgtcccgctccaggcgacctccctgctcgaggagcgccccgacggcacccgggcctgccacaccgcggtcgtcggccgactgctcgcccagggcgcgctgcccgtgctgtccagcgactgctacctcaccgccgagggcaccctgcgcatcctcagcagcgacgacgtgcccgccgtcctgctggacctgggcctcggcccggtccgggtggtggccctcaccgatgtcgacggcatccacaccgggggccccggctccccggtgctcgcccacctcgatcccgacgacctggccgccgcacgcgccctgttctggacggacgcatgggatgccaccggtgccatggagggcaaggtcgaggcgctggccgactccgcccggcgcggcgccgagtgcgtcatcacccgcggcgaccgcacggcggccgacctcaggcacctgttcgccccgctgccggactggccgcgaaacgccccgcgcacgctgatctcgcggcgcgccccgaccgacagcgccctctcacccgccctctccctggagaacgccccatga

SEQ ID NO: 93 - DNA, 873 bp, Artificial Sequence
  IP7 codon optimised
atgaccggtccgggcacccgtgcaggcgaacctggtctgctggtgctgaaagtgggtggtagcctgctgagtgataaacgccataccggcgaaaccgattataccgcaattgatgattatgcaggtctgctggcagatctggttgccgcattccctggtcgtgtggttctggttaccggtggcggcgcactgtgccatccggtgggtctgcgtattaaagccgcaaaagatgatccgtatgcagcagtggcactgaccgaaccggccttccgcatgagatgggcctggaccacccgcctgcgtgcaaaaggcgtgcgcgccgttccgctgcaagccacaagtctgctggaagaacgcccggatggtacccgtgcatgtcataccgcagttgttggtcgcctgctggcccagggcgccttacctgtgctgagcagcgattgctatctgaccgcagaaggtaccctgcgtattctgagtagcgatgatgtgccggccgtgctgctggatctgggcctgggtccggttcgcgtggtggcactgacagatgttgatggcattcataccggcggtccgggcagcccggttctggcacatctggaccctgatgatctggccgccgcccgcgctctgttctggacagatgcctgggatgcaaccggcgcaatggaaggtaaagtggaagccctggccgatagcgcccgtcgcggtgcagaatgcgttattacccgtggtgatcgcaccgcagccgatctgcgtcatctgttcgcaccgctgccggattggccgcgcaatgcccctcgtaccctgattagccgccgcgccccgaccgatagtgccttatctccggccctgagtctggaaaatgcaccgtga

SEQ ID NO: 94 - protein, 299 aa, Sphaerisporangium sp.
  IP8
MEAMGLSSPAVDRTWRSTQRARESSASDRVLAVKIGGSLFSDKSVAGSLDKGRIARFARVISSLHERFPGQVVLITGGGAIGHGALRGIDPADPFAAIGLTKALADVRWAWTQALVGLGVRAFPLQLGAMATLDDDLSFRVRADIVERVLASGALPILSGDSVLDANGNLHGLSSDRVPEFLVRALQTPLRVASFTDVPGIVLGGPGGKETLRYVDPMTPQAAYEALWTNSEWDTTGGFKTKVDALIRCAAEGAECFILEGVAQDSEWAYLLSPYSGWSNKLHCTRIARSPAAAVSTAE

SEQ ID NO: 95 - DNA, 900 bp, Sphaerisporangium sp.
  IP8 wild type
ttggaggcgatggggttgagtagtccggctgtcgatagaacatggcgctccacgcagcgcgcccgtgagagctcggcgtcagatcgcgtgcttgcggtgaagatcggtggcagtcttttctctgataagagtgtcgccggcagcttggataaaggtcgtattgctaggttcgctcgagtgatctccagccttcatgagcgttttcccggccaggtcgtccttatcacaggaggcggtgccatcgggcacggcgcactacgaggaatcgatccggcagaccccttcgccgcaatcggcttgaccaaggcgctcgcggacgtccggtgggcatggacgcaagctttggtaggtctcggggtaagggcgtttccgctccagcttggcgcgatggcgacattggatgacgatctgtcgttccgcgtgagggccgatatcgtcgagcgggtcctggcgagcggcgcgcttccgatcctatcgggcgacagcgtcttggacgccaatggaaacctgcacggcctgtcgagtgaccgcgtaccagaattccttgtacgtgccttgcagacacccctgcgggtcgcgagcttcactgatgtcccgggcattgtgctgggaggaccgggcggaaaggaaacgctccgctacgtggaccccatgaccccccaggcagcctatgaagcactgtggaccaacagtgaatgggacaccacagggggcttcaagaccaaggtggacgcgctcattcgatgtgcagcggagggcgcggagtgcttcattcttgagggagttgcgcaagactccgagtgggcatatctgctctcaccgtacagcgggtggtccaacaagctccactgtacccggatcgcgcgctctccggccgcagcagtcagcaccgccgagtag

SEQ ID NO: 96 - DNA, 900 bp, Artificial Sequence
  IP8 codon optimised
atggaagcaatgggtctgagcagtccggccgtggatcgtacctggcgcagtacccagcgtgcacgcgaaagcagcgccagcgatcgtgtgctggcagttaaaattggtggcagtctgttcagcgataaaagcgttgcaggtagcctggataaaggccgtattgcacgcttcgcccgtgttattagtagcctgcatgaacgcttccctggtcaggtggtgctgattaccggtggcggtgccattggtcatggcgcactgcgtggcattgatccggcagatccgttcgcagcaattggcctgaccaaagcactggcagatgtgcgttgggcctggacccaggcactggttggcctgggtgttcgtgcattcccgctgcaactgggcgcaatggctaccctggatgatgatctgagcttccgtgttcgcgcagatattgttgaacgtgttctggcaagtggcgcactgccgattctgagcggcgatagcgtgctggatgcaaatggtaatctgcatggcctgagcagtgatcgtgttccggagttcctggttcgcgcactgcaaacacctctgcgcgttgccagcttcaccgatgtgccgggcattgtgctgggtggtccgggcggtaaagaaaccttacgttatgtggaccctatgaccccgcaggccgcctatgaagcactgtggaccaatagtgaatgggataccaccggtggcttcaaaaccaaagttgatgccctgattcgctgtgccgcagaaggtgccgaatgcttcattctggaaggtgttgcccaggatagtgaatgggcctatctgctgagtccgtatagcggctggagtaataaactgcattgcacccgcattgcccgcagcccggccgcagcagttagcacagccgaatga

SEQ ID NO: 97 - protein, 269 aa, Actinoalloteichus sp.
  IP9
MVDDVVDLLVVKVGGSLVSEKARRDHLDHDALAGYAAQIADLHAAAPGRVVLVVGGGSIGHGAVRHLDADDPLAPLPLTRATFDVKWSWVRALRDLGSRCFPVQVAAICVLGPRGPEVSFGTVRRLLDHGILPVLAGDSVLCADGALRVFGSDHVPAVAVRGTPGRTRVAVLTDVPGVLAGGPGSQEVIPEITPGSSAEAFRRIWPAAAHDTSGSMGGKLTALLDHARDGAECFVLRGDPTAPDLRFLLEGRGRWPDVPHTRIVADTTG

SEQ ID NO: 98 - DNA, 810 bp, Actinoalloteichus sp.
  IP9 wild type
gtggtggatgacgtggtcgacctgctggtggtgaaggtgggcgggagcctggtctcggagaaggcccggcgcgaccacctggaccacgacgccctggcggggtacgcggcgcagatcgcggacctgcacgccgccgcccccgggcgcgtggtcctcgtcgtgggcggcggatccatcgggcacggggccgtgcggcacctcgacgccgacgaccccctcgccccgttgcccctcacccgtgcgaccttcgacgtcaagtggtcgtgggtgcgggcgttgcgggacctcggctcgcggtgcttccccgtccaggtcgccgccatctgcgtgctcggcccccgggggccggaggtcagcttcgggaccgtgcgacgcctgctcgaccacggcatcctcccggtgctggccggtgacagcgtgctctgcgccgacggtgcgctgcgggtgttcggcagcgaccacgtcccggccgtggccgtgcgtggcacgccgggtcggacgcgggtcgccgtgctcaccgacgtcccgggagtgctggctggcggtcccggcagccaggaggtgatcccggagatcacgccggggtcctcggccgaggcgttccggcggatctggccggcggcggcgcacgacaccagcggatcgatggggggcaagctgacggcgctcctcgaccacgcccgcgacggcgccgagtgcttcgtgcttcgaggcgatccgacggcgccggacctgcggttcctgctcgaagggcgcggcaggtggcccgacgtgccgcacacccggatcgtcgccgacaccaccggttga

SEQ ID NO: 99 - DNA, 810 bp, Artificial Sequence
  IP9 codon optimised
atggtggatgatgttgttgatctgctggtggttaaagtgggtggtagtctggttagtgaaaaagcacgccgtgatcatctggatcatgatgccctggcaggttatgccgcacagattgccgatctgcacgctgccgcccctggtcgtgtggtgctggtggttggcggcggtagcattggtcatggcgcagtgcgtcatctggatgcagatgatccgctggcaccgctgccgctgacccgtgcaaccttcgatgttaaatggagttgggtgcgcgcactgcgcgatctgggcagccgttgcttcccggttcaggttgcagccatctgtgtgctgggtccgcgcggtccggaagttagcttcggcaccgtgcgtcgtctgctggatcatggtattctgccggtgctggcaggtgatagcgttctgtgtgcagatggcgcactgcgcgtgttcggcagcgatcatgtgccggccgttgcagtgcgtggtacccctggtcgcacccgtgttgcagtgctgaccgatgtgccgggtgttctggccggtggtccgggtagccaggaagtgattccggaaattacccctggtagtagcgccgaagccttccgccgtatctggccggccgccgcacatgataccagcggtagtatgggtggcaaactgaccgcactgctggatcacgcccgtgatggcgccgaatgcttcgttctgcgtggcgatccgaccgccccggatctgcgcttcctgctggaaggtcgcggccgttggccggatgtgccgcatacccgtattgtggccgataccaccggctga

SEQ ID NO: 100 - protein, 302 aa, Bifiguratus adelaidae
  IP10
MTFELCLVKVGGAALTDKSRPSTLADPKILTTIASQLGTAFSTFSGTRKRLVIVHGVGSFGHPQAKKYNLSSGYDMENASEDEKEYKVDGVVETRQSVMTLHQKVCDLFIAQGIPAISMSPFHYVRTLHTPKSTKPDAYIRLVEAVDRALTLGYVPVLHGDAVLDDAQGCAILSGDVVIRELARGLRAGPSPKYSLHNCTFLTDVNGVFDRDPKLTMDEPPHLIQSIKISKYQVERMVNHSSSIDVTGAMTGKLQCAMNIVKDALEAGIEPIGQVIICRAASADAMHVLCGQEADNRTVVEP

SEQ ID NO: 101 - DNA, 909 bp, Bifiguratus adelaidae
  IP10 wild type
atgacctttgagctgtgccttgtgaaggtgggaggtgccgcgttgacggacaaaagcaggccgtcaacgttggccgaccccaaaatactcaccaccatagcatcacaactcggcacagcattctcgacctttagtggaacgcgcaaacgactcgtcatagttcacggtgtgggctcgtttggtcacccgcaagctaaaaagtacaatctctccagtggatatgatatggagaatgcctccgaggacgagaaagagtacaaggtagacggagttgtggagacgcggcagtctgtcatgacattgcatcaaaaggtatgcgatctattcattgctcagggcattccagcaatcagtatgtcgccttttcattatgtgcgaaccctgcatacccctaagtcgacaaagccagacgcgtatatacgattggtggaggcggttgaccgagcattgacgctcggatatgtgccagtgttgcacggcgatgcagtcctcgatgatgcgcaaggttgcgccatcctcagtggcgatgtggtgatccgggagcttgcccgtgggctacgcgctggaccatcacctaaatacagtcttcacaattgtacattcttaacggatgtgaacggtgtctttgaccgcgatccaaagttaactatggatgaaccaccgcatctgatccagagcatcaagatcagcaaataccaagtagagaggatggtgaatcattcatcttccatcgatgtcactggtgccatgacgggaaagcttcaatgcgcaatgaacattgtcaaagatgcgcttgaggccggtattgagcctatagggcaagtcattatatgtagagcagcgtctgcggacgccatgcatgtgctttgtggtcaagaggctgacaataggaccgtcgttgagccttaa

SEQ ID NO: 102 - DNA, 909 bp, Artificial Sequence
  IP10 codon optimised
atgaccttcgaactgtgtctggtgaaagttggtggtgcagcactgaccgataaaagtcgtccgagtaccctggcagatccgaaaattctgaccaccattgcaagccagctgggcaccgcattcagtaccttcagcggcacccgcaaacgtctggtgattgttcatggtgttggcagcttcggtcatccgcaggccaaaaaatataatctgagcagtggctatgatatggaaaatgccagtgaagatgaaaaagaatataaggttgacggcgtggtggaaaccagacagagcgttatgaccctgcatcagaaagtgtgcgatctgttcattgcccagggtattccggccattagcatgagtccgttccattatgttcgtaccctgcataccccgaaaagtaccaaaccggatgcctatattcgcctggttgaagccgtggatcgcgccctgaccctgggctatgttccggtgctgcatggcgatgcagtgctggatgatgcacagggctgtgcaattctgagcggcgatgttgttattcgtgaactggcccgtggcctgcgtgccggtcctagtcctaaatatagtctgcataattgtaccttcctgaccgatgtgaatggcgtgttcgatcgtgatccgaaactgacaatggatgaaccgccgcatctgattcagagcattaaaattagcaaataccaggtggaacgcatggtgaatcatagtagcagtattgatgttaccggtgccatgaccggtaaactgcaatgcgccatgaatattgtgaaagatgccctggaagcaggcattgaaccgattggtcaggtgattatctgtcgtgcagcaagcgccgatgccatgcatgttctgtgtggtcaggaagccgataatcgcaccgtggtggaaccgtga

SEQ ID NO: 103 - protein, 245 aa, Thermoplasma acidophilum
  IP11
MMILKIGGSVITDKSAYRTARTYAIRSIVKVLSGIEDLVCVVHGGGSFGHIKAMEFGLPGPKNPRSSIGYSIVHRDMENLDLMVIDAMIEMGMRPISVPISALRYDGRFDYTPLIRYIDAGFVPVSYGDVYIKDEHSYGIYSGDDIMADMAELLKPDVAVFLTDVDGIYSKDPKRNPDAVLLRDIDTNITFDRVQNDVTGGIGKKFESMVKMKSSVKNGVYLINGNHPERIGDIGKESFIGTVIR

SEQ ID NO: 104 - DNA, 738 bp, Thermoplasma acidophilum
  IP11 wild type
atgatgatactgaagataggcggaagcgtgatcaccgataaatccgcttaccggactgccaggacgtacgccataaggagcatagttaaggttctatccggaatcgaggatctggtgtgcgtggttcacggcggcggttccttcggccatataaaggcgatggaatttggactgccaggcccaaagaacccaagatccagcattggatacagcatagttcacagagacatggagaatcttgatctcatggtcatcgatgcaatgatagagatgggcatgcgaccgatatccgtgccaataagcgccctgcgctatgacggccgcttcgattacacccctcttatcaggtacatagatgctggttttgttcctgtatcatacggtgacgtatatataaaggatgaacattcatatggtatatactctggagacgacataatggccgacatggcagaactgctgaaaccagatgtagctgtattccttaccgatgttgatggcatctacagcaaggatccgaagagaaatcctgatgcggtgcttctcagggatatagatacaaatatcaccttcgatcgggtgcagaacgatgttaccggcggtatagggaagaagttcgaatccatggtgaagatgaagagcagcgtgaaaaacggagtttacctgatcaacgggaaccatccagagaggatcggagacattggaaaggaatcattcataggtacggtgataagatga

SEQ ID NO: 105 - DNA, 738 bp, Artificial Sequence
  IP11 codon optimised
atgatgatcctgaaaatcggcggtagcgtgattaccgataaaagcgcctatcgtaccgcccgtacctatgccattcgtagtattgttaaagttctgagtggcattgaagatctggtgtgtgttgttcatggtggtggcagcttcggtcatattaaagcaatggagttcggcctgccgggtccgaaaaatccgcgtagtagcattggctatagtattgttcatcgtgatatggaaaacctggatctgatggtgattgatgccatgattgaaatgggcatgagaccgattagtgtgccgattagtgccctgcgttatgatggtcgcttcgattataccccgctgattcgctatattgatgccggcttcgtgccggtgagttatggtgatgtgtatattaaagatgagcatagctatggtatctatagcggtgatgatattatggccgatatggccgaactgctgaaaccggatgttgccgtgttcctgaccgatgttgatggtatctattcaaaagatccgaaacgtaatccggatgccgtgctgctgcgcgatattgataccaatattaccttcgatcgtgtgcagaatgatgtgaccggtggtattggtaaaaaattcgaaagtatggttaagatgaagagtagcgttaaaaatggtgtgtatctgattaatggtaaccatccggaacgtattggcgatattggcaaagaatcattcattggtaccgtgattcgctga

SEQ ID NO: 106 - protein, 270 aa, Tumebacillus algifaecis
  IP12
MNVVKIGGSLLTDKDGYCAPNQEMVRQYARTIAKEWERLRGNLILIVGGGSYGNAVPVRYHLKDASLPWKDTDLSMMTVKMFEWLSLVTQIFREEGVPCYPFQTSGYVVTKNKRPQRFFVEPVEHVLSMGVLPVFSGDLVFDEEQQFIIFSSDNLPELFVERMSLRRMVMLTDVEGVMQIGTDGQQTVIPEVTRANFQEVLRCAGPSQKPDITGGMKNKLEALLRLAEQGVEGVITSGRKAEALLPALFEPEPVGTMIRPWAQENRGGLL

SEQ ID NO: 107 - DNA, 813 bp, Tumebacillus algifaecis
  IP12 wild type
atgaatgtagtcaagattggagggagtttgctgaccgataaggacggctactgtgcgccgaatcaggagatggtgcggcagtatgcgcgcacgatcgccaaggagtgggagcggctgcgtggcaacttgatcctgatcgtcggcggaggctcgtatgggaatgcagtgccggttcgctatcacttgaaggatgcttccctgccgtggaaagatacggacctgtcgatgatgacggtgaagatgtttgagtggttgtcgctggtgacccagatttttcgggaagagggagtgccttgctatccgttccagaccagcgggtatgtggtgacgaaaaacaaacggccccagcgtttttttgtggagccggtggagcacgtgctgtcgatgggggtgctgcccgttttctcgggcgacctggtctttgatgaggagcagcagtttatcattttttcgagtgataatttgcccgagttgtttgtcgagcggatgtctctccggcggatggtgatgctgaccgatgttgagggagtgatgcaaatcggaacggatgggcagcagacggtgattcctgaagtgacgcgtgcaaattttcaggaggtgctgcgctgtgcggggccttcgcaaaagccggatatcacaggcggaatgaaaaataagctggaagctctgttgcgcttggcggagcagggagtggaaggtgtgatcaccagcggaaggaaggcggaggcattgctgccagcgttgtttgagcccgagcctgtaggcacgatgattcggccttgggcacaagagaatagagggggattgctgtag

SEQ ID NO: 108 - DNA, 813 bp, Artificial Sequence
  IP12 codon optimised
atgaacgtggtgaaaattggtggcagcctgctgaccgataaagatggctattgcgcaccgaatcaggaaatggttcgccagtatgcccgcaccattgcaaaagaatgggaacgtctgcgtggtaatctgattctgattgttggcggtggcagctatggcaatgcagttccggttcgctatcatctgaaagatgccagcctgccgtggaaagataccgatctgagcatgatgaccgttaaaatgttcgaatggctgagtctggttacccagatcttccgtgaagaaggtgtgccgtgttatccgttccagaccagcggttatgtggtgaccaaaaataaacgtccgcagcgcttcttcgttgaaccggtggaacatgtgctgagtatgggtgtgctgccggtgttcagcggtgatctggtgttcgatgaagaacagcagttcattatcttcagtagcgataatctgccggaactgttcgtggaacgcatgagcctgcgtcgtatggttatgctgaccgatgttgaaggtgttatgcagattggcaccgatggccagcagaccgtgattccggaagtgacccgcgcaaacttccaggaagtgctgcgctgcgccggtccgagtcagaaaccggatattaccggtggcatgaaaaataaactggaagccctgctgcgcctggcagaacagggtgttgaaggtgtgattaccagcggtcgcaaagccgaagcactgctgccggccctgttcgaaccggaaccggtgggcaccatgattcgcccgtgggcccaggaaaatcgtggtggtctgctgtga

SEQ ID NO: 109 - DNA, 5365 bp, Artificial Sequence
  Plasmid
cgatcaccacaattcagcaaattgtgaacatcatcacgttcatctttccctggttgccaatggcccattttcctgtcagtaacgagaaggtcgcgaattcaggcgctttttagactggtcgtaatgaacaattcttaagaaggagatatacatatgcagacaagaaaaatcgtccgggcagccgccgtacaggccgcctctcccaactacgatctggcaacgggtgttgataaaaccattgagctggctcgtcaggcccgcgatgagggctgtgacctgatcgtgtttggtgaaacctggctgcccggatatcccttccacgtctggctgggcgcaccggcctggtcgctgaaatacagtgcccgctactatgccaactcgctctcgctggacagtgcagagtttcaacgcattgcccaggccgcacggaccttgggtattttcatcgcactgggttatagcgagcgcagcggcggcagcctttacctgggccaatgcctgatcgacgacaagggcgagatgctgtggtcgcgtcgcaaactcaaacccacgcatgtagagcgcaccgtatttggtgaaggttatgcccgtgatctgattgtgtccgacacagaactgggacgcgtcggtgctctatgctgctgggagcatttgtcgcccttgagcaagtacgcgctgtactcccagcatgaagccattcacattgctgcctggccgtcgttttcgctatacagcgaacaggcccacgccctcagtgccaaggtgaacatggctgcctcgcaaatctattcggttgaaggccagtgctttaccatcgccgccagcagtgtggtcacccaagagacgctagacatgctggaagtgggtgaacacaacgcccccttgctgaaagtgggcggcggcagttccatgatttttgcgccggacggacgcacactggctccctacctgcctcacgatgccgagggcttgatcattgccgatctgaatatggaggagattgccttcgccaaagcgatcaatgaccccgtaggccactattccaaacccgaggccacccgtctggtgctggacttggggcaccgagaccccatgactcgggtgcactccaaaagcgtgaccagggaagaggctcccgagcaaggtgtgcaaagcaagattgcctcagtcgctatcagccatccacaggactcggacacactgctagtgcaagagccgtccttgaggatccgtcgacctgcagccaagcttggctgttttggcggatgagagaagattttcagcctgatacagattaaatcagaacgcagaagcggtctgataaaacagaatttgcctggcggcagtagcgcggtggtcccacctgaccccatgccgaactcagaagtgaaacgccgtagcgccgatggtagtgtggggtctccccatgcgagagtagggaactgccaggcatcaaataaaacgaaaggctcagtcgaaagactgggcctttcgttttatctgttgtttgtcggtgaacgctctcctgagtaggacaaatccgccgggagcggatttgaacgttgcgaagcaacggcccggagggtggcgggcaggacgcccgccataaactgccaggcatcaaattaagcagaaggccatcctgacggatggcctttttgcgtttctacaaactcttttgtttatttttctaaatacattcaaatatgtatccgctcatgagacaataaccctgataaatgcttcaataatattgaaaaaggaagagtatgagtattcaacatttccgtgtcgcccttattcccttttttgcggcattttgccttcctgtttttgctcacccagaaacgctggtgaaagtaaaagatgctgaagatcagttgggtgcacgagtgggttacatcgaactggatctcaacagcggtaagatccttgagagttttcgccccgaagaacgttttccaatgatgagcacttttaaagttctgctatgtggcgcggtattatcccgtgttgacgccgggcaagagcaactcggtcgccgcatacactattctcagaatgacttggttgagtactcaccagtcacagaaaagcatcttacggatggcatgacagtaagagaattatgcagtgctgccataaccatgagtgataacactgcggccaacttacttctgacaacgatcggaggaccgaaggagctaaccgcttttttgcacaacatgggggatcatgtaactcgccttgatcgttgggaaccggagctgaatgaagccataccaaacgacgagcgtgacaccacgatgcctgtagcaatggcaacaacgttgcgcaaactattaactggcgaactacttactctagcttcccggcaacaattaatagactggatggaggcggataaagttgcaggaccacttctgcgctcggcccttccggctggctggtttattgctgataaatctggagccggtgagcgtgggtctcgcggtatcattgcagcactggggccagatggtaagccctcccgtatcgtagttatctacacgacggggagtcaggcaactatggatgaacgaaatagacagatcgctgagataggtgcctcactgattaagcattggtaactgtcagaccaagtttactcatatatactttagattgatttaaaacttcatttttaatttaaaaggatctaggtgaagatcctttttgataatctcatgaccaaaatcccttaacgtgagttttcgttccactgagcgtcagaccccgtagaaaagatcaaaggatcttcttgagatcctttttttctgcgcgtaatctgctgcttgcaaacaaaaaaaccaccgctaccagcggtggtttgtttgccggatcaagagctaccaactctttttccgaaggtaactggcttcagcagagcgcagataccaaatactgtccttctagtgtagccgtagttaggccaccacttcaagaactctgtagcaccgcctacatacctcgctctgctaatcctgttaccagtggctgctgccagtggcgataagtcgtgtcttaccgggttggactcaagacgatagttaccggataaggcgcagcggtcgggctgaacggggggttcgtgcacacagcccagcttggagcgaacgacctacaccgaactgagatacctacagcgtgagctatgagaaagcgccacgcttcccgaagggagaaaggcggacaggtatccggtaagcggcagggtcggaacaggagagcgcacgagggagcttccagggggaaacgcctggtatctttatagtcctgtcgggtttcgccacctctgacttgagcgtcgatttttgtgatgctcgtcaggggggcggagcctatggaaaaacgccagcaacgcggcctttttacggttcctggccttttgctggccttttgctcacatgttctttcctgcgttatcccctgattctgtggataaccgtattaccgcctttgagtgagctgataccgctcgccgcagccgaacgaccgagcgcagcgagtcagtgagcgaggaagcggaagagcgcctgatgcggtattttctccttacgcatctgtgcggtatttcacaccgcatatatggtgcactctcagtacaatctgctctgatgccgcatagttaagccagtatacactccgctatcgctacgtgactgggtcatggctgcgccccgacacccgccaacacccgctgacgcgccctgacgggcttgtctgctcccggcatccgcttacagacaagctgtgaccgtctccgggagctgcatgtgtcagaggttttcaccgtcatcaccgaaacgcgcgaggcagctgcggtaaagctcatcagcgtggtcgtgaagcgattcacagatgtctgcctgttcatccgcgtccagctcgttgagtttctccagaagcgttaatgtctggcttctgataaagcgggccatgttaagggcggttttttcctgtttggtcactgatgcctccgtgtaagggggatttctgttcatgggggtaatgataccgatgaaacgagagaggatgctcacgatacgggttactgatgatgaacatgcccggttactggaacgttgtgagggtaaacaactggcggtatggatgcggcgggaccagagaaaaatcactcagggtcaatgccagcgcttcgttaatacagatgtaggtgttccacagggtagccagcagcatcctgcgatgcagatccggaacataatggtgcagggcgctgacttccgcgtttccagactttacgaaacacggaaaccgaagaccattcatgttgttgctcaggtcgcagacgttttgcagcagcagtcgcttcacgttcgctcgcgtatcggtgattcattctgctaaccagtaaggcaaccccgccagcctagccgggtcctcaacgacaggagcacgatcatgcgcacccgtggccaggacccaacgctgcccgagatgcgccgcgtgcggctgctggagatggcggacgcgatggatatgttctgccaagggttggtttgcgcattcacagttctccgcaagaattgattggctccaattcttggagtggtgaatccgttagcgaggtgccgccggcttccattcaggtcgaggtggcccggctccatgcaccgcgacgcaacgcggggaggcagacaaggtatagggcggcgcctacaatccatgccaacccgttccatgtgctcgccgaggcggcataaatcgccgtgacgatcagcggtccaatgatcgaagttaggctggtaagagccgcgagcgatccttgaagctgtccctgatggtcgtcatctacctgcctggacagcatggcctgcaacgcgggcatcccgatgccgccggaagcgagaagaatcataatggggaaggccatccagcctcgcgtcgcgaacgccagcaagacgtagcccagcgcgtcggccgccatgccggcgataatggcctgcttctcgccgaaacgtttggtggcgggaccagtgacgaaggcttgagcgagggcgtgcaagattccgaataccgcaagcgacaggccgatcatcgtcgcgctccagcgaaagcggtcctcgccgaaaatgacccagagcgctgccggcacctgtcctacgagttgcatgataaagaagacagtcataagtgcggcgacgatagtcatgccccgcgcccaccggaaggagctgactgggttgaaggctctcaagggcatcggtcgacgctctcccttatgcgactcctgcattaggaagcagcccagtagtaggttgaggccgttgagcaccgccgccgcaaggaatggtgcatgcat

SEQ ID NO: 110 - DNA, 5016 bp, Artificial Sequence
  Plasmid IPK11 in pDHE165
catatgatgatcctgaaaatcggcggtagcgtgattaccgataaaagcgcctatcgtaccgcccgtacctatgccattcgtagtattgttaaagttctgagtggcattgaagatctggtgtgtgttgttcatggtggtggcagcttcggtcatattaaagcaatggagttcggcctgccgggtccgaaaaatccgcgtagtagcattggctatagtattgttcatcgtgatatggaaaacctggatctgatggtgattgatgccatgattgaaatgggcatgagaccgattagtgtgccgattagtgccctgcgttatgatggtcgcttcgattataccccgctgattcgctatattgatgccggcttcgtgccggtgagttatggtgatgtgtatattaaagatgagcatagctatggtatctatagcggtgatgatattatggccgatatggccgaactgctgaaaccggatgttgccgtgttcctgaccgatgttgatggtatctattcaaaagatccgaaacgtaatccggatgccgtgctgctgcgcgatattgataccaatattaccttcgatcgtgtgcagaatgatgtgaccggtggtattggtaaaaaattcgaaagtatggttaagatgaagagtagcgttaaaaatggtgtgtatctgattaatggtaaccatccggaacgtattggcgatattggcaaagaatcattcattggtaccgtgattcgctgactgaaagcttggctgttttggcggatgagagaagattttcagcctgatacagattaaatcagaacgcagaagcggtctgataaaacagaatttgcctggcggcagtagcgcggtggtcccacctgaccccatgccgaactcagaagtgaaacgccgtagcgccgatggtagtgtggggtctccccatgcgagagtagggaactgccaggcatcaaataaaacgaaaggctcagtcgaaagactgggcctttcgttttatctgttgtttgtcggtgaacgctctcctgagtaggacaaatccgccgggagcggatttgaacgttgcgaagcaacggcccggagggtggcgggcaggacgcccgccataaactgccaggcatcaaattaagcagaaggccatcctgacggatggcctttttgcgtttctacaaactcttttgtttatttttctaaatacattcaaatatgtatccgctcatgagacaataaccctgataaatgcttcaataatattgaaaaggaagagtatgagtattcaacatttccgtgtcgcccttattcccttttttgcggcattttgccttcctgtttttgctcacccagaaacgctggtgaaagtaaaagatgctgaagatcagttgggtgcacgagtgggttacatcgaactggatctcaacagcggtaagatccttgagagttttcgccccgaagaacgttttccaatgatgagcacttttaaagttctgctatgtggcgcggtattatcccgtgttgacgccgggcaagagcaactcggtcgccgcatacactattctcagaatgacttggttgagtactcaccagtcacagaaaagcatcttacggatggcatgacagtaagagaattatgcagtgctgccataaccatgagtgataacactgcggccaacttacttctgacaacgatcggaggaccgaaggagctaaccgcttttttgcacaacatgggggatcatgtaactcgccttgatcgttgggaaccggagctgaatgaagccataccaaacgacgagcgtgacaccacgatgcctgtagcaatggcaacaacgttgcgcaaactattaactggcgaactacttactctagcttcccggcaacaattaatagactggatggaggcggataaagttgcaggaccacttctgcgctcggcccttccggctggctggtttattgctgataaatctggagccggtgagcgtgggtctcgcggtatcattgcagcactggggccagatggtaagccctcccgtatcgtagttatctacacgacggggagtcaggcaactatggatgaacgaaatagacagatcgctgagataggtgcctcactgattaagcattggtaactgtcagaccaagtttactcatatatactttagattgatttaaaacttcatttttaatttaaaaggatctaggtgaagatcctttttgataatctcatgaccaaaatcccttaacgtgagttttcgttccactgagcgtcagaccccgtagaaaagatcaaaggatcttcttgagatcctttttttctgcgcgtaatctgctgcttgcaaacaaaaaaaccaccgctaccagcggtggtttgtttgccggatcaagagctaccaactctttttccgaaggtaactggcttcagcagagcgcagataccaaatactgtccttctagtgtagccgtagttaggccaccacttcaagaactctgtagcaccgcctacatacctcgctctgctaatcctgttaccagtggctgctgccagtggcgataagtcgtgtcttaccgggttggactcaagacgatagttaccggataaggcgcagcggtcgggctgaacggggggttcgtgcacacagcccagcttggagcgaacgacctacaccgaactgagatacctacagcgtgagctatgagaaagcgccacgcttcccgaagggagaaaggcggacaggtatccggtaagcggcagggtcggaacaggagagcgcacgagggagcttccagggggaaacgcctggtatctttatagtcctgtcgggtttcgccacctctgacttgagcgtcgatttttgtgatgctcgtcaggggggcggagcctatggaaaaacgccagcaacgcggcctttttacggttcctggccttttgctggccttttgctcacatgttctttcctgcgttatcccctgattctgtggataaccgtattaccgcctttgagtgagctgataccgctcgccgcagccgaacgaccgagcgcagcgagtcagtgagcgaggaagcggaagagcgcctgatgcggtattttctccttacgcatctgtgcggtatttcacaccgcatatatggtgcactctcagtacaatctgctctgatgccgcatagttaagccagtatacactccgctatcgctacgtgactgggtcatggctgcgccccgacacccgccaacacccgctgacgcgccctgacgggcttgtctgctcccggcatccgcttacagacaagctgtgaccgtctccgggagctgcatgtgtcagaggttttcaccgtcatcaccgaaacgcgcgaggcagctgcggtaaagctcatcagcgtggtcgtgaagcgattcacagatgtctgcctgttcatccgcgtccagctcgttgagtttctccagaagcgttaatgtctggcttctgataaagcgggccatgttaagggcggttttttcctgtttggtcacttgatgcctccgtgtaagggggaatttctgttcatgggggtaatgataccgatgaaacgagagaggatgctcacgatacgggttactgatgatgaacatgcccggttactggaacgttgtgagggtaaacaactggcggtatggatgcggcgggaccagagaaaaatcactcagggtcaatgccagcgcttcgttaatacagatgtaggtgttccacagggtagccagcagcatcctgcgatgcagatccggaacataatggtgcagggcgctgacttccgcgtttccagactttacgaaacacggaaaccgaagaccattcatgttgttgctcaggtcgcagacgttttgcagcagcagtcgcttcacgttcgctcgcgtatcggtgattcattctgctaaccagtaaggcaaccccgccagcctagccgggtcctcaacgacaggagcacgatcatgcgcacccgtggccaggacccaacgctgcccgagatgcgccgcgtgcggctgctggagatggcggacgcgatggatatgttctgccaagggttggtttgcgcattcacagttctccgcaagaattgattggctccaattcttggagtggtgaatccgttagcgaggtgccgccggcttccattcaggtcgaggtggcccggctccatgcaccgcgacgcaacgcggggaggcagacaaggtatagggcggcgcctacaatccatgccaacccgttccatgtgctcgccgaggcggcataaatcgccgtgacgatcagcggtccagtgatcgaagttaggctggtaagagccgcgagcgatccttgaagctgtccctgatggtcgtcatctacctgcctggacagcatggcctgcaacgcgggcatcccgatgccgccggaagcgagaagaatcataatggggaaggccatccagcctcgcgtcgcgaacgccagcaagacgtagcccagcgcgtcggccgccatgccggcgataatggcctgcttctcgccgaaacgtttggtggcgggaccagtgacgaaggcttgagcgagggcgtgcaagattccgaataccgcaagcgacaggccgatcatcgtcgcgctccagcgaaagcggtcctcgccgaaaatgacccagagcgctgccggcacctgtcctacgagttgcatgataaagaagacagtcataagtgcggcgacgatagtcatgccccgcgcccaccggaaggagctgactgggttgaaggctctcaagggcatcggtcgacgctctcccttatgcgactcctgcattaggaagcagcccagtagtaggttgaggccgttgagcaccgccgccgcaaggaatggtgcatgcatcgatcaccacaattcagcaaattgtgaacatcatcacgttcatctttccctggttgccaatggcccattttcctgtcagtaacgagaaggtcgcgaattcaggcgctttttagactggtcgtaatgaacaattcttaagaaggagatata

SEQ ID NO: 111 - protein, 273 aa, Streptomyces silvensis
MSGPAGDGLIATIRERRPLVHMITNLVSMAACAQTVKSLGAATIFAHAAEEAAEIAGTADAVVLNVGTSVPGMDRTAVQVAEACAARSIPVVLDPLGSGASRFRSHLARALLDTGAVRMVSGNVAELADLCGVPSVIRGADAVSATAPADEVCMKLAESAQVIAAVSGRTDYVGDGRQLAAITNGHPVMGQVVGTGSARSAVLGAFAAVAGADMFTATVTGVCAYGIAGELAAATGRGPGYLLPEVCNQLSVMDDEMVATRSRVTTSAPRDPS

SEQ ID NO: 112 - DNA, 822 bp, Streptomyces silvensis
atgagcgggccggcaggtgacgggctgatcgccacgatccgcgagcgccgcccgctcgtacacatgatcaccaatctggtgtcgatggctgcctgtgcgcagaccgtgaagtcgctgggcgccgcgaccatcttcgcgcacgcggccgaggaggcggcggagatcgccgggacggcggacgccgtggtgctcaacgtcgggacctccgtgccggggatggaccggaccgcggtacaggtcgccgaggcctgtgcggcacggtcgatccccgtcgtcctcgacccgttgggatccggggccagccggttccgctcgcacctcgccagggcgctgctcgacaccggagccgtccgcatggtgtccggcaatgtcgccgagctggcggacctgtgtggtgtcccgtcggtgatacgtggcgccgacgccgtcagcgccaccgcaccagcggacgaggtgtgcatgaagctggcggagtccgcccaggtcatcgccgccgtctccggccgcaccgactacgtgggcgacggacggcagctggccgcgatcaccaacggacatccggtcatgggacaggtggtcggcaccggcagcgcacggtccgcggtgctcggcgccttcgcggccgtcgcaggtgcggacatgttcaccgcgacggtcaccggggtctgcgcctacggcatcgccggtgagctggcggcggccaccggcaggggacccggctatctcctgcccgaggtctgcaatcagctgtccgtcatggatgacgagatggtcgcgacccggtcgcgggtcaccacgtccgcccccagggatccctcgtga

SEQ ID NO: 113 - DNA, 832 bp, Artificial sequence
  Codon optimised sequence
atgagcggtccggccggtgatggtctgattgcaaccattcgcgaacgtcgtccgctggttcacatgattaccaatctggttagtatggcagcctgcgcccagaccgttaaaagtctgggcgcagcaaccatcttcgcccatgcagcagaagaagccgcagaaattgccggtaccgcagatgccgttgttctgaatgtgggcaccagtgtgccgggcatggatcgcaccgccgtgcaggtggcagaagcctgcgcagcacgtagcattccggtggttctggaccctctgggtagtggtgcaagccgcttccgtagtcatctggcccgtgcactgctggataccggcgcagtgcgcatggtgagtggtaatgttgcagaactggccgatctgtgtggtgtgccgagcgttattcgcggtgcagatgcagtgagtgccaccgcaccggcagatgaagtgtgcatgaaactggcagaaagcgcacaggtgattgccgccgttagtggtcgtaccgattatgttggtgatggtcgtcagctggccgccattaccaatggccatccggttatgggtcaggttgttggcaccggtagcgcacgtagcgccgttctgggtgccttcgccgcagtggccggcgcagatatgttcaccgccaccgtgaccggcgtgtgtgcatacggtattgccggtgaactggccgcagcaaccggtcgtggtccgggttatctgctgccggaagtgtgcaatcagctgagcgtgatggatgatgaaatggttgccacccgtagccgtgttaccaccagcgcaccgcgtgatccgagttgactgaaagctt

SEQ ID NO: 114 - protein, 277 aa, Halarchaeum acidiphilum
MTTDFTVAESLERIAAEQPLINCVTNAVTVNDVANVTLHWGGLPVMSDDAREVGDMVAGAQGCLLNMGTVSEAGEEAMLTAGNAANDHGVPLVVDPVGVGATPTRDRVAEALVTDLDPTIVKGNYGEITALAGADAEVRGVESVGDYADVAETAVALARDTGAVVVASGETDVVASADAAYEVENGDAMLGTVVGTGCMLGVTLAVFAAALDDAETAALAGTLAFGVAGEAAAKGDFGDYAGPASYRVAFLDAVAGLDGVEVEHPDPDARITRVLDA

SEQ ID NO: 115 - DNA, 834 bp, Halarchaeum acidiphilum
atgaccaccgacttcaccgtcgccgagagcctcgaacgcatcgccgccgaacagccgctcatcaactgcgtgacgaacgccgtcaccgtcaacgacgtcgcgaacgtcaccctccactggggcggtctccccgtgatgtccgacgacgcccgcgaagtcggcgacatggtcgcgggcgcgcagggctgtctcctcaacatgggcaccgtgagcgaggccggcgaggaagcgatgctgacggccggcaacgccgcgaacgaccacggcgtcccgctcgtcgtcgatcccgtcggcgtcggcgcgacgccgacccgcgatcgcgtcgccgaagccctcgtcaccgacctcgatccgacgatcgtgaaggggaactacggcgagataacggcgctcgcgggcgcggatgcagaggttcgcggcgtcgagtccgtcggcgactacgcggacgtcgcggagacggccgtcgcgctcgcccgcgacaccggcgccgtcgtcgtcgcgtcgggtgagacggacgtcgtcgcgagcgccgatgcggcctacgaggtcgagaacggcgacgcgatgctcggaacggtcgtcgggacgggctgtatgctcggcgtgacgctcgccgtgttcgccgcggcgctcgacgacgcggagacggccgcgctcgccggcacgctcgcgttcggcgtcgcgggcgaggccgccgcgaagggcgacttcggcgactacgcagggccggcgagctaccgcgtcgcgttcctcgacgccgtcgccggactcgacggggtcgaggtcgagcaccccgatcccgacgcgcggatcacgcgcgtcctcgacgcgtag

SEQ ID NO: 116 - DNA, 844 bp, Artificial sequence
  Codon optimised sequence
atgaccaccgacttcaccgtggccgaaagcctggaacgcattgcagccgaacagccgctgattaattgtgttaccaatgccgttaccgttaatgatgttgcaaatgtgaccctgcattggggtggtctgccggtgatgagcgatgatgcacgtgaagttggcgatatggttgccggcgcccagggttgtctgctgaatatgggcaccgttagtgaagcaggcgaagaagccatgctgaccgccggcaatgcagccaatgatcatggtgtgccgctggtggtggaccctgtgggtgttggcgccaccccgacccgtgatcgtgtggcagaagcactggttaccgatctggaccctaccattgtgaaaggtaattatggcgaaattaccgccctggccggtgccgatgcagaagttcgtggcgtggaaagcgttggtgattatgccgatgtggccgaaaccgccgttgccctggcccgtgataccggcgcagtggttgtggcaagcggtgaaaccgatgtggtggcaagtgccgatgccgcatacgaagtggaaaatggtgatgccatgctgggcaccgttgttggtaccggttgtatgctgggtgtgaccctggcagtgttcgcagcagccctggatgatgccgaaaccgcagcactggcaggtaccctggcattcggtgtggcaggcgaagccgcagccaaaggtgacttcggcgattatgccggcccggccagctatcgtgttgccttcctggatgcagttgccggcctggatggtgttgaagttgaacatccggaccctgatgcccgtattacccgtgtgctggatgcatgactgaaagctt

SEQ ID NO: 117 - protein, 258 aa, Legionella rubrilucens
MLYQLDTRLKRLRAEKPLVLCLTNAVTMNFVANSLLALGAAPIMSQADDELEALITISRALYVNIGTLDRQFIERIDKACRLAAIHQKPIILDPVGAGASQIRTLTARQLSPQAAIIRGNASEIIALTADKGISKGVETLHPVEAALTAALTLSQQTSAIVVVSGPVDFITDGRQCCHLSYGSPLMPLVTGMGCALTAIIAAFAAMETPFYEAAAAGTAYVGLCGQSAHRSASGPASFQSAFIDALYQMPFEELDDAL

SEQ ID NO: 118 - DNA, 777 bp, Legionella rubrilucens
atgctttatcaactggatacccggcttaagcgcttgcgcgcggagaagcctttggtgctctgtttaacgaatgcagtgaccatgaacttcgtagccaacagcctgctggcgctgggggctgcaccgatcatgtcacaggcagatgacgagcttgaggcactgattaccatatcacgggctctctatgtcaatattggtaccttggacagacagtttattgagcggattgacaaggcttgccgccttgccgccattcaccagaaacccatcatactcgatcccgtgggggcgggagccagtcaaatcaggacgttgacagcccggcaactttcaccccaagccgccattattcgcggtaacgccagtgaaattattgctttgacggcagataaaggcatcagcaagggagtggaaacgcttcatccggtggaggcggcattgactgctgcattgactctatcacagcagacatcggcgattgtcgttgtcagcggccccgtggattttattacggatggccgccaatgttgccatttgtcctatggttcgccgctgatgcctttggtcacgggaatggggtgtgccctgaccgccatcattgcggcctttgccgcgatggaaacgcctttttatgaagccgccgctgcgggtacagcctatgtcgggctatgcggccagtcagctcatcgttcagccagtggtccggccagctttcagagcgcgttcattgatgccctttatcaaatgccatttgaggagctggatgatgcgctataa

SEQ ID NO: 119 - DNA, 787 bp, Artificial sequence
  Codon optimised sequence
atgctgtatcagctggatacccgtctgaaacgtctgcgtgcagaaaaaccgctggttctgtgtctgaccaatgccgtgaccatgaacttcgttgcaaatagtctgctggcactgggtgccgccccgattatgagccaggccgatgatgaactggaagccctgattaccattagccgcgcactgtatgttaatattggtaccctggatcgccagttcattgaacgcattgataaagcatgccgtctggcagccattcatcagaaaccgattattctggaccctgtgggtgcaggcgccagccagattcgcaccctgaccgcacgtcagctgagtccgcaggccgccattattcgcggcaatgcaagcgaaattattgcactgaccgccgataaaggcattagcaaaggcgtggaaaccttacatccggtggaagcagcactgaccgcagcactgacactgagccagcagaccagcgcaattgttgttgttagtggcccggttgacttcattaccgatggtcgccagtgctgtcatctgagctatggtagcccgctgatgccgctggtgaccggcatgggctgcgccttaaccgcaattattgccgcattcgccgcaatggaaacaccgttctatgaagcagcagcagcaggtaccgcatacgttggtctgtgcggtcagagtgcccatcgcagcgccagtggcccggctagcttccagagtgccttcattgatgccctgtatcagatgccgttcgaagaactggatgatgcactgtgactgaaagctt

SEQ ID NO: 120 - protein, 273 aa, Leuconostoc mesenteroides
MKNELIKIKSILPLQKAPLVHCITNDITLETVANTILYLGGKPIMSSDTREFSSLFQSTDALLLNMGRLNESHEQSLSQASSLADMTKKPTVVDLVGYGITNERTKLGMAMARNHPTVIKGNTSEIRRFVGLPSLAKGIDGASSDQHDQALKDLILSLKQITTEYADTVFVATGKKDVIVQNDKHLILSNGVDELDKFVGTGDMVGAIITTLLAVGEDPWVASQFAISYLNVAAEKALSLTNGMENFRREVLNQIDLLGRNQQWATKIKYSNF

SEQ ID NO: 121 - DNA, 822 bp, Leuconostoc mesenteroides
atgaaaaatgaattaataaaaattaaatcaattttacctttgcaaaaggcaccgttagtacattgcataaccaatgatattacgttagaaacggtggctaatactatattgtatcttggtggtaaacctatcatgagtagtgatacccgtgaattttcgtcattatttcagtcaacagatgctctactactaaacatgggccgacttaatgagtcacacgaacaaagtctcagtcaagctagctctttagcagatatgactaaaaaaccgactgttgtggatctggtaggctatggtattactaatgaacgaacaaagttaggaatggctatggcgcgtaatcatccaacagttatcaaaggaaatacttcagaaatcagaagatttgtcggcttaccatctttagcaaaaggtattgatggtgctagctctgatcagcatgatcaggcgttaaaagatctcattttgtctttgaaacaaataacaactgagtatgccgatactgtgtttgtggcaacagggaaaaaggatgtcattgttcaaaatgataaacaccttattttgagcaatggcgtcgatgaattggataagtttgttgggacaggagacatggttggcgcaattataactacacttctcgcggtcggtgaagatccgtgggttgctagtcaatttgcaattagctacctcaatgtagctgctgaaaaagcattgtcattaacaaacggcatggaaaactttagacgagaagttcttaaccaaattgatttgctagggagaaatcaacagtgggcaacgaaaattaagtattcgaatttttga

SEQ ID NO: 122 - DNA, 832 bp, Artificial sequence
  Codon optimised sequence
atgaagaacgaactgattaagatcaagagtattctgccgctgcaaaaagccccgctggttcattgcattaccaatgatattaccctggaaaccgttgccaataccattctgtatctgggtggtaaaccgattatgagtagtgatacccgtgagttcagtagtctgttccagagcaccgatgcactgctgctgaatatgggccgtctgaatgaaagtcatgaacagagcctgagccaggcaagcagcctggccgatatgaccaaaaaaccgaccgttgtggatctggttggttatggtattaccaatgaacgtaccaaactgggtatggcaatggcacgcaatcatccgaccgtgattaaaggtaataccagcgaaattcgtcgcttcgtgggcctgccgagtctggccaaaggtattgatggtgccagtagtgatcagcatgatcaggcactgaaagacttaattctgagtctgaaacagattaccaccgaatatgcagataccgtgttcgttgcaaccggtaaaaaagatgtgattgtgcagaatgataagcatctgattctgagtaatggcgtggatgaactggataaattcgtgggtaccggtgatatggttggcgcaattattaccaccctgctggcagtgggtgaagatccgtgggtggccagccagttcgccattagctatctgaatgtggcagcagaaaaagccctgagcctgaccaatggtatggaaaacttccgtcgtgaagttctgaatcagattgatctgctgggccgcaatcagcagtgggcaaccaaaattaaatatagcaacttctgactgaaagctt

SEQ ID NO: 123 - protein, 252 aa, Leptospira species
MITNNPLILNITNQVTTHFIASSLIALGASPVMSDDPSDAYDLVDITNGICLNIGTISSHQMDIMRNVLSNPKAKNIVLDPVGAGASSIRSSSCKEILESGKIDLIRGNASEISSIAGLSSTTRGVDSTMETKSVEITADKLAKDRSCIVVVSGEVDYITNGTDKYRVNNGASIMAKITGTGCVLSSYLAAVLASGNKSIESIAFAVAYYGVLGEKAALDNTGLGNYRERFLDAMSTIHFDSVKPSLRISKL

SEQ ID NO: 124 - DNA, 759 bp, Leptospira species
atgataaccaataatcctctcatattaaatataaccaaccaggtgactacgcattttattgcgagttctttgattgcattaggcgcttcaccagtaatgtcagatgatcccagcgatgcttacgatcttgttgacattacaaatggtatttgtttaaatataggaacaatatcatctcaccaaatggatataatgcgaaatgttctttctaaccctaaggcaaagaatattgttttagaccctgttggtgcgggagcaagcagtattcgatcttcatcatgtaaagaaattctagaatcaggtaaaatcgatttaattcgaggaaatgcttctgagatttctagtatcgctggcttatcttccacaaccagaggagtagactcaacaatggaaactaaatctgtggaaataacagccgataaattagcgaaagatcgtagttgtatagtggttgtaagcggggaggttgattatattacaaatggcaccgataagtatcgagttaacaatggagcctcgattatggcaaagattacaggaacaggctgcgttctctcctcttatctagctgcagttttagcttctggaaataaatcaattgaaagcattgctttcgcagtcgcatactatggagtattaggtgagaaagctgcattagacaacacaggcttaggaaattatagagaaagattcttagacgctatgagtacaatccattttgattctgtgaaaccttcattaaggatttcaaaactatga

SEQ ID NO: 125 - DNA, 769 bp, Artificial sequence
  Codon optimised sequence
atgatcaccaataacccgctgattctgaatattaccaatcaggttaccacccacttcattgccagtagtctgattgccctgggcgccagtccggtgatgagcgatgatccgagtgatgcatacgatctggtggatattaccaatggtatctgtctgaatattggcaccattagtagccatcagatggatattatgcgtaatgtgctgagcaatccgaaagcaaaaaatattgtgctggaccctgtgggtgcaggtgccagtagcattcgtagtagtagctgcaaagaaattctggaaagtggcaaaattgatctgattcgcggtaatgcaagcgaaattagtagcattgcaggcctgagcagcaccacccgcggtgtggatagcaccatggaaaccaaaagcgttgaaattaccgcagataaactggcaaaagatcgtagctgtattgtggtggttagtggcgaagtggattatattaccaatggcaccgataaatatcgcgtgaataatggcgcaagtattatggccaaaattaccggtaccggctgcgttctgagtagttatctggcagccgtgctggcaagcggcaataaaagcattgaaagtattgcattcgccgttgcatattatggcgttctgggcgaaaaagcagcactggataataccggtctgggtaattatcgtgaacgcttcctggatgccatgagtaccattcacttcgatagtgtgaaaccgagtctgcgcattagtaaactgtgactgaaagctt

SEQ ID NO: 126 - protein, 277 aa, Johnsonella ignava
MIFNEKKEIYGVDIKGFYVKIAKKNPGIHCITNIVSANDCANILLAMGASPVMAQHVLDAGEISGGCDALVCNFGATGAYDAMYEAAKSAALLKHPIVADPVGVGASAYRRSCFLDFISKFKVSCIRGNISEIRALHEKRPTARGVDVSEYELKNNSGDESVLFKNAEWIREFSLKVNCIVVCSGETDIVTDGKNTVFVTDGCILMSRVSATGCMASAVTAAFLSVENSFISAAASISFMGRCGEYALKHLERGTSGIGSGSFRVGLIDAAGLIFNE

SEQ ID NO: 127 - DNA, 834 bp, Johnsonella ignava
atgatatttaatgagaaaaaagaaatatatggggttgatataaagggattttatgtaaaaattgcgaaaaaaaatcccggtatacattgtataacaaatatagtcagtgcaaatgactgtgctaatatactgcttgctatgggggcatcacctgttatggcacagcatgtacttgatgcgggagagataagtggaggctgtgatgctcttgtatgtaatttcggtgctacaggagcttatgatgcgatgtatgaggctgcaaaaagtgcagccttacttaagcatccaatagtggcagatcccgtaggagtgggagcttcggcttacagaagaagctgctttcttgattttataagtaaatttaaggtttcatgtataaggggaaacatatcggaaatacgggcattgcatgaaaaacgtccgactgcaaggggagttgatgtatctgaatatgagcttaaaaataattcaggtgatgagtcagtactttttaaaaatgccgaatggataagggaattttcattaaaggtgaattgtattgtagtatgttcaggcgaaactgatatagtaactgacgggaaaaataccgtttttgtaactgacggctgtattcttatgtcaagagtaagtgctacgggctgtatggcatctgcggttacggcggcttttttaagtgtggaaaatagttttatttcagctgcggcatctatatcttttatgggaagatgcggagaatatgctcttaagcatttagagagagggacttcaggcatagggagcggcagtttcagagtaggactgattgatgcggcaggacttatatttaatgagtag

SEQ ID NO: 128 - DNA, 844 bp, Artificial sequence
  Codon optimised sequence
atgatcttcaacgaaaagaaggaaatctatggtgttgatattaagggcttctatgttaaaatcgccaaaaaaaatccgggcattcattgcattaccaatattgttagtgccaatgattgcgcaaatattctgctggccatgggtgcaagcccggtgatggcccagcatgttctggatgccggtgaaattagcggcggttgtgatgccctggtgtgtaacttcggtgcaaccggtgcctatgatgccatgtatgaagcagcaaaaagtgcagccctgctgaaacatccgattgtggccgatccggtgggtgtgggtgccagtgcatatcgtcgtagttgcttcctggacttcattagcaaattcaaagtgagttgtatccgtggtaatattagtgaaattcgtgcactgcatgaaaaacgtccgaccgcacgcggtgtggatgttagcgaatatgaactgaaaaataacagcggcgatgaaagcgtgctgttcaaaaatgccgaatggattcgtgagttcagtctgaaagtgaattgtattgttgtgtgtagcggcgaaaccgatattgtgaccgatggtaaaaataccgtgttcgtgaccgatggctgcattctgatgagtcgcgttagtgccaccggttgcatggccagcgccgtgaccgccgcattcctgagcgttgaaaatagcttcattagtgccgccgccagcattagcttcatgggccgctgcggtgaatatgccctgaaacatctggaacgtggtaccagtggtattggtagcggcagcttccgcgtgggtctgattgatgccgccggtctgatcttcaatgaatgactgaaagctt

SEQ ID NO: 129 - protein, 272 aa, Dichelobacter nodosus
MTESLEMGKSIDFNVQTFDFKSAQFYLDRAYANAPFIHCLTNNTTKFFVANALLAIGAKPAMVESWQEVVEFSQRAANVVMNLDSLTDERLRSLSMSAQVAHDHGKWWVFDPAAVSDILSYRSGFARELLRYYPRVIRGNASEISYLNDTYGRRSFENVMSSSEAIEAAVKLAIHQRAVVVVTGEIDYVTDGETILAVRGGHPFLGRVCGTGCVLSAMIASTVLCGDVLYGAASACALMKRAGERAGLTTSGLGSFYVALLDNLTFPMRYQD

SEQ ID NO: 130 - DNA, 819 bp, Dichelobacter nodosus
atgacggaatcattggaaatgggtaaaagtattgattttaatgtgcaaacttttgattttaaatcggcacaattttatctcgatcgggcttatgcaaatgcgccgtttattcattgtttaacgaataatacgactaaattttttgtggcaaatgcattgttggcaattggcgcgaaaccggcaatggtggaatcgtggcaggaagtcgttgaattttctcaacgtgcggcaaatgtggtgatgaatttggattcgttaaccgatgagcggttgcgttctttatcgatgagtgcgcaagtagcgcatgatcacggcaaatggtgggtttttgatccggcagcggtcagcgatattttgtcttaccgcagcggttttgcgcgcgaattattgcgttattatccgcgggtgattcgtggcaatgcctcggaaatttcttatttgaatgatacgtacggacgccgtagttttgaaaatgtgatgagttcttcggaagcaattgaagcggcagtgaaattagccattcatcaacgtgcggttgtcgtcgttacgggagaaattgattatgtgaccgacggcgagacgattttagcagtgcgcggcggacacccttttttagggcgcgtttgcggcacgggttgcgttttatcggcgatgattgcgtcaacggtattatgtggtgacgttttgtatggcgcggcttctgcgtgcgctttgatgaaacgcgccggtgaacgggcgggtttaacgacttcgggattaggcagtttttatgttgcgttattggataatttaacgtttccaatgcgttatcaagattaa

SEQ ID NO: 131 - DNA, 829 bp, Artificial sequence
  Codon optimised sequence
atgaccgaaagcctggaaatgggcaaaagtattgacttcaatgttcagaccttcgacttcaaaagtgcccagttctatctggatcgtgcctatgcaaatgccccgttcattcattgtctgaccaataataccaccaaattcttcgtggcaaatgcactgctggcaattggtgcaaaaccggcaatggtggaaagctggcaggaagtggttgagttcagccagcgcgccgccaatgttgttatgaatctggatagtctgaccgatgaacgtctgcgtagtctgagtatgagtgcacaggtggcacatgatcatggcaaatggtgggtgttcgatccggccgcagtgagtgatattctgagctatcgtagtggcttcgcccgcgaactgctgcgctattatccgcgtgttattcgtggtaatgccagtgaaattagttatctgaatgatacctacggtcgccgcagcttcgaaaatgtgatgagcagcagtgaagccattgaagcagccgtgaaactggccattcatcagcgtgccgtggttgttgtgaccggcgaaattgattatgtgaccgatggtgaaaccattctggccgtgcgtggtggtcatccgttcctgggccgcgtgtgtggtaccggctgcgtgctgagtgcaatgattgccagtaccgttctgtgtggtgatgtgctgtatggtgccgcaagtgcctgcgcactgatgaaacgcgcaggcgaacgcgccggtctgaccacaagcggtctgggtagcttctatgttgccctgctggataatctgaccttcccgatgcgctatcaggattgactgaaagctt

SEQ ID NO: 132 - protein, 284 aa, Butyrivibrio species
MSELIHCITNPISMMQCANAILALGAKPIMAEHPLEVMEITESASALVINLGNISDTRMESMEISFETALKKNIPVVIDAVGVACSKLRRDFVMRLLKMRSKKTELSLREKGILLLKGNYSEIKAIFDESYRGVGVDADESLGASEIADIVRVLALNLGVIVLASGEKDIVSDVSRTFFISNGNPIMGVITGTGCMLGAICGVFLARDASIEAVLRAAGFFGIAGEIAYERAEAVTERLTNGKASESMVGSGSFLVELLNAISMIDEETVKSLLRCAEEKHSSN

SEQ ID NO: 133 - DNA, 855 bp, Butyrivibrio species
atgtctgagctaattcactgtataacaaatccaatatctatgatgcaatgcgcaaatgcaattttagcacttggcgcgaagccgataatggctgagcatccgttggaagtcatggagatcactgagagcgcttctgctcttgtaattaatctgggtaatatatcggacaccagaatggagtcgatggagatatcttttgaaactgctctgaagaaaaatataccggttgtgatagatgcggtgggcgtagcctgctccaagcttcgcagggatttcgtgatgaggcttctaaagatgaggtcgaagaaaacggaattgtctttgagggaaaaggggatccttttacttaagggaaactactccgagattaaggcgatttttgatgagtcctacaggggagttggcgtcgatgccgacgaaagtctgggagcttcagagatagctgatattgtaagagtgctggctttgaatctgggagtgatcgtgctcgccagcggtgagaaggatatcgtatcagatgtaagtcgtacattttttataagtaatgggaatccgataatgggggtgattacgggaacgggatgcatgctaggggctatatgcggcgtgtttctggcaagggatgcgagcatagaagctgtcctccgcgcagccggatttttcgggattgctggagaaattgcatatgagagagcggaagcagttacggagaggcttacaaatggcaaagcatctgaaagcatggttggaagcggaagttttcttgttgaacttttaaatgcaatttcaatgatcgatgaagaaactgtaaaaagtttgcttagatgcgctgaagaaaaacattcatctaactga

SEQ ID NO: 134 - DNA, 865 bp, Artificial sequence
  Codon optimised sequence
atgagcgaactgattcattgtattaccaatccgattagtatgatgcagtgtgcaaatgcaattctggcactgggcgcaaaaccgattatggcagaacatccgctggaagtgatggaaattaccgaaagcgcaagtgcactggtgattaatctgggcaatattagtgatacccgcatggaaagtatggaaattagcttcgaaaccgccctgaaaaaaaatattccggtggttattgatgccgtgggcgtggcctgctctaaactgcgtcgcgacttcgttatgcgcctgctgaaaatgcgtagcaaaaaaaccgaactgagcctgcgcgaaaaaggcattctgctgctgaaaggtaattatagcgaaattaaagcaatcttcgacgaaagttatcgtggtgttggcgtggatgcagatgaaagcctgggtgcaagcgaaattgccgatattgtgcgtgtgctggcactgaatctgggcgtgattgtgctggccagtggtgaaaaagatattgtgagcgatgtgagtcgtaccttcttcattagcaatggtaatccgattatgggtgttattaccggcaccggctgtatgctgggcgcaatctgtggcgtgttcctggcacgcgatgccagtattgaagccgttctgcgcgcagcaggcttcttcggcattgccggcgaaattgcctatgaacgtgcagaagccgttaccgaacgtctgaccaatggcaaagccagtgaaagcatggtgggcagcggcagcttcctggtggaactgctgaatgcaattagcatgattgatgaagaaaccgttaaaagtctgctgcgttgtgccgaagaaaaacatagtagcaattgactgaaagctt

SEQ ID NO: 135 - protein, 260 aa, Agrilactobacillus composti
MQLDLLNQLRAQVPLVVNYANYVTPNFVANGLNALGASPIMTSEVDEADDLVKITNTVVINLGTINHYETDLVWQLCTSAVKYHKPIVLDPVAVGATAYRLDIAQKLLQDFPIAVIRGNVGEIAALAQVDWATKGIDAGTGDADPAAIAKACATRYHNVVALSGITDYITDGQQLFKVGNQTPLLPLTVGSGDLLSSIIGAFVGITDNYYEAAQVGCAVLACTGEIAAQPLHSHEGGTFAARLLDKLTIVDKEDILEILK

SEQ ID NO: 136 - DNA, 783 bp, Agrilactobacillus composti
atgcaattagatttattgaatcagctccgtgcccaagtcccactggtggtcaactacgccaattatgtcacccccaactttgtggctaacggtttgaacgccttgggggcctcgcccattatgacgtccgaagtcgatgaagccgatgacttggttaaaatcaccaatacagttgtcatcaacttggggaccatcaaccattatgaaacggacttagtttggcagctttgcaccagtgccgtgaaatatcacaagcccatcgtgttagatcccgttgccgtgggggcaacggcctatcgtttagatatcgcccaaaaattactgcaagatttcccgattgccgttatccggggcaatgtgggtgaaattgcggctttagcccaggtggattgggccactaaaggtattgacgctgggaccggggatgcggatccggccgctattgccaaggcttgtgccacccgttatcacaatgtggtggccttaagtggtattaccgattacatcacggatggccagcagcttttcaaagtgggcaaccaaaccccactgctccccttgaccgtgggttctggggacttattatccagcatcatcggggcttttgtgggcattactgacaattactacgaagctgcccaggtgggctgtgctgtactagcttgtaccggtgaaattgccgcccaaccgctacattcccacgagggtggtacctttgccgcccgattattggacaaattgaccatcgttgacaaagaagatattctcgaaattttgaaatag

SEQ ID NO: 137 - DNA, 793 bp, Artificial sequence
  Codon optimised sequence
atgcagctggatctgctgaatcagctgcgtgcacaggttccgctggtggttaattatgccaattatgtgaccccgaacttcgttgcaaatggcctgaatgccctgggtgcaagcccgattatgaccagtgaagtggatgaagcagatgatctggtgaaaattaccaataccgttgttattaacctgggcaccattaatcattatgaaaccgatctggtgtggcagctgtgtaccagtgcagttaaatatcataaaccgattgtgctggaccctgttgccgtgggcgccaccgcatatcgtctggatattgcacagaaactgctgcaagacttcccgattgccgtgattcgtggcaatgttggcgaaattgcagcactggcacaggtggattgggccaccaaaggtattgatgccggcaccggtgatgcagatccggcagcaattgcaaaagcatgcgcaacccgttatcataatgttgttgcactgagtggtattaccgattatattaccgatggtcagcagctgttcaaagttggcaatcagaccccgctgctgccgctgaccgttggcagcggtgatctgctgagtagcattattggtgccttcgtgggcattaccgataattattatgaagcagcacaggttggctgtgcagttctggcctgcaccggcgaaattgcggcccagccgctgcatagtcatgaaggtggtaccttcgcagcccgcctgctggataaactgaccattgttgataaagaagatatcctggaaatcctgaaatgactgaaagctt

SEQ ID NO: 138 - protein, 276 aa, Proteiniclasticum ruminis
MNLRNHVEKLYAQKFEEKYPLVCFLTNYVTVLDLVDMCIHSGGSPVLTDEISEAHEMVEYSKSQAVVMNFGTINREYLDIMTLTGKTANRVHVPVILDPAAITASSFRKYAIEHLLKEVKVDILKGNLGEIKFILGYETKNKGIDSFEDENGAEKYCIELAEKLGAVVVMTGKTDIITDGKRMAKVSNGDAKLKKICGAGSSVAAIMATYSGLTKDYFLSATVGCAVMGVASEMAEERMKEREGIRTFKTYVHDAVSMMETKELMNRLNLVEVELD

SEQ ID NO: 139 - DNA, 831 bp, Proteiniclasticum ruminis
atgaatctgagaaatcatgtagagaagctctacgcacagaaattcgaggagaaatatcctctggtctgctttctgaccaattatgtgaccgtactggatttggtggatatgtgcattcattccggaggttcaccggtgctgacggatgaaatctcggaagctcatgaaatggtggagtattccaagtcccaagcggtggtcatgaactttggcaccatcaacagggagtatctggacattatgacgttgacaggaaaaactgccaatagagttcatgtgcctgtaattctggatcctgcagccatcaccgcttcttctttcagaaagtatgccattgagcatcttctgaaagaggtgaaggtggatattctcaaagggaaccttggtgaaatcaagtttattttaggatatgaaacaaaaaacaagggcatcgactcttttgaggatgaaaatggagccgagaagtactgcatcgagcttgcagaaaagctgggcgcggtggtggtgatgacagggaaaacagatatcatcaccgatggaaagagaatggccaaagtatccaatggagatgccaaactgaagaaaatctgcggagctggatcttctgtggctgccatcatggcgacctattcaggtctcacaaaggactacttcttaagtgctactgttgggtgcgctgtcatgggcgtagcctctgagatggcagaagaaagaatgaaggaaagagaaggcatccgcacgttcaagacctatgtacatgatgcggtttctatgatggaaacgaaggagctcatgaacaggctgaaccttgtggaagttgagttagattag

SEQ ID NO: 140 - DNA, 841 bp, Artificial sequence
  Codon optimised sequence
atgaacctgcgtaatcatgttgaaaaactgtatgcacagaaattcgaagaaaaatatccgctggtgtgcttcctgaccaattatgtgaccgtgctggatctggtggatatgtgtattcatagcggcggtagtccggtgctgaccgatgaaattagcgaagcccatgaaatggttgaatatagcaaaagccaggcagtggtgatgaacttcggtaccattaatcgtgaatatctggatattatgaccctgaccggtaaaaccgccaatcgtgttcatgttccggtgattctggaccctgccgccattaccgccagcagcttccgtaaatatgcaattgaacatctgctgaaagaagtgaaagttgatattctgaaaggcaatctgggcgaaattaaattcattctgggttatgaaaccaagaataaaggcattgatagcttcgaagatgaaaatggcgccgaaaaatattgcattgaactggccgaaaaactgggtgcagtggtggttatgaccggcaaaaccgatattattaccgatggtaaacgtatggcaaaagttagcaatggtgatgcaaaactgaaaaaaatctgtggcgcaggtagtagcgtggccgcaattatggcaacctatagcggtctgaccaaagattacttcctgagcgccaccgtgggctgcgcagttatgggcgtggcaagcgaaatggccgaagaacgtatgaaagaacgcgaaggcattcgtaccttcaaaacctatgtgcatgatgcagttagcatgatggaaaccaaagaactgatgaatcgcctgaatctggtggaagtggaactggattgactgaaagctt

SEQ ID NO: 141 - protein, 277 aa, Oxobacter pfennigii
MGNKVLIDILKCYNERENKTPLVHFITNFVTMNDVANACLYMGGKPVMAHWEQEINEITSAAHSLVLNLGTPDEARIDAIKKAARIAEAKDIPVILDPVGIHVFSVRLDLARYLLENRQVNVLKGNYSEVMAFLNMKSNFIGIDSLEEGFKRDVIEKIKEFSEINKLYIVITGKEDYVFYKDNAVRITNGTPLLSKITGSGCILSAILGTLCAKGNKKDIFSLCVMGTLINSIAGEKAQDKIKKSHEGFHTFKNYYLDELSLVNDDDILSRGRVFYV

SEQ ID NO: 142 - DNA, 834 bp, Oxobacter pfennigii
atggggaataaggttctgattgatattttaaaatgctataatgaaagagaaaacaaaactcccctggttcattttataactaattttgtaaccatgaatgatgtcgccaatgcctgcctgtatatggggggaaagcccgtaatggcacactgggagcaggagattaatgaaataacttcagctgctcattctctggttttaaatttaggcacacctgatgaagcaaggattgatgctattaaaaaagcagccaggattgcagaggctaaggatattcctgtaattttagaccctgtaggaatacacgttttttctgtaagattggaccttgcaagatatcttttggagaacaggcaagtgaatgtattaaagggaaactattcggaagttatggcttttttaaatatgaaaagcaattttataggcatagattcccttgaagaaggctttaaaagagatgtcattgaaaaaataaaagagttctcagagattaataaattgtatatagttattaccggtaaagaagattatgttttttataaggacaacgctgtaagaataactaacggcactccccttctttccaaaataacaggttccggctgtattttaagcgccatcctcggcaccctttgtgcaaaaggcaataaaaaagatattttttcattatgtgttatgggcactcttattaactccatagccggtgaaaaagcgcaggataaaattaaaaaatcacatgagggatttcatacctttaaaaattattacttggatgagctctctcttgtgaatgatgatgatattttaagcagagggagagttttttatgtctag

SEQ ID NO: 143 - DNA, 844 bp, Artificial sequence
  Codon optimised sequence
atgggtaataaggttctgattgatatcctgaaatgttataacgaacgtgaaaataagaccccgctggttcacttcattaccaacttcgttaccatgaatgatgtggccaatgcatgtctgtatatgggcggtaaaccggttatggcccattgggaacaggaaattaatgaaattaccagcgcagcacatagcctggttctgaatctgggtaccccggatgaagcacgtattgatgcaattaaaaaagcagcccgtattgccgaagccaaagatattccggtgattctggaccctgtgggtattcatgtgttcagcgtgcgcctggatctggcccgttatctgctggaaaatcgtcaggtgaatgttctgaaaggtaattatagcgaagtgatggcattcctgaatatgaaaagcaacttcattggtattgacagtctggaagaaggcttcaaacgtgatgttattgaaaaaattaaggagttcagcgaaatcaataagctgtatattgttatcaccggcaaagaagattatgtgttctataaagataacgcagttcgtattaccaatggcaccccgctgctgagcaaaattaccggcagcggttgtattctgagtgcaattctgggcaccctgtgtgcaaaaggtaataaaaaagatatcttcagcctgtgtgttatgggcaccctgattaatagcattgccggcgaaaaagcacaggataaaattaaaaaaagccacgaaggcttccataccttcaaaaattattatctggacgaactgagcctggttaatgatgatgatattctgagccgcggtcgtgtgttctatgtttgactgaaagctt

SEQ ID NO: 144 - protein, 270 aa, Planomicrobium species
MISKIRSENPIIHCITNHVVSNFQANGLLAIGASPIMGEAQEEVEELVAISRALSLNIGTLNKETLHSMLLAGKRANKEKIPVILDPVGAGATAFRKDAIQKILTDIDVSVLRCNAGELAAIGGVRWASKGVDAGEGNVDLEELATRVAIEYSLVVAVTGETDIVADGSRVEKITGGDRMMSSVTGMGCLLSAVTAAFMAVSPDNPTAAAIEALKFYGTAGEKAAAVSEGPGSFRDTFLDVLFGMEIEETGFDFEKGEGVDVLWQRSSRY

SEQ ID NO: 145 - DNA, 813 bp, Planomicrobium species
atgatcagtaaaatccgcagtgaaaatccaatcatccattgcatcaccaatcacgtcgtgtcgaattttcaagcgaacgggctgctggcaatcggtgcttcgcccatcatgggcgaagcacaagaagaagtggaagaactggtcgccatttcgcgcgccttgtcattgaatatcggaacgttgaataaagaaacgcttcatagcatgctgctcgccggtaaacgggcgaataaggaaaaaattccggtgatcctggatccagtgggagcaggcgcgaccgcttttcggaaagatgccatacagaagattttaacggatatcgatgtcagtgtgctgcgctgcaacgcgggtgaactggcggcaatcggcggagtgagatgggcctctaaaggcgtcgatgccggtgaaggcaatgtcgacttggaggaactggcaactcgagtagcaatagaatacagcttggtggtggcagtgacaggcgagaccgatatcgtggccgacggttcgcgggtggaaaagattacgggcggcgaccggatgatgagttcagtgaccggcatgggctgtctgctcagcgctgtgacagccgctttcatggcagtaagtccggacaatccaacagctgcggcaatcgaagctctcaaattttacgggacggccggtgaaaaggcagcggcagtttcagaaggacccggcagtttccgcgacacattcctggatgttttattcggcatggagatcgaggaaaccggcttcgactttgaaaaaggggaaggggtggatgtactgtggcagcgatcaagcaggtattga

SEQ ID NO: 146 - DNA, 823 bp, Artificial sequence
  Codon optimised sequence
atgatcagcaaaatccgcagcgaaaatccgattattcattgtattaccaaccatgtggttagcaacttccaggccaatggtctgctggccattggtgccagcccgattatgggcgaagcccaggaagaagtggaagaactggtggccattagccgcgccctgagcctgaatattggcaccctgaataaagaaaccttacatagtatgctgctggccggtaaacgcgcaaataaagaaaaaattccggtgattctggaccctgtgggtgcaggcgcaaccgcattccgcaaagatgccattcagaaaattctgaccgatattgatgttagcgtgctgcgctgtaatgccggtgaactggccgcaattggtggcgttcgttgggcaagtaaaggtgttgatgcaggcgaaggtaatgttgatctggaagaactggccacccgcgttgcaattgaatatagtctggttgtggccgttaccggcgaaaccgatattgttgcagatggcagccgtgtggaaaaaattaccggcggtgatcgcatgatgagtagtgttaccggcatgggctgcctgctgagtgcagttaccgccgcattcatggccgtgagtccggataatccgaccgccgcagcaattgaagccctgaaattctatggtaccgccggtgaaaaagccgccgcagtgagcgaaggcccgggcagcttccgtgataccttcctggatgtgctgttcggcatggaaattgaagaaaccggcttcgacttcgaaaaaggcgaaggtgtggatgtgctgtggcagcgcagcagccgttattgactgaaagctt

SEQ ID NO: 147 - protein, 259 aa, Lachnospiraceae bacterium
MQEELIEQIRVNRPLVHCITNQVTVNYVVNMLLGLGARAEGTDAPEEAAEIAGRSQALMLNVGAPTESLANSMIEAGRRANEMGVPVVLDPDGVGKSSFRLEIVNEILNSVYVTCIRGTATDLAALNGWELEENATLSLDDLQIIADKYNVCVVMTGQEDLVVYHASQARISNNIPFMKRVAGSGAALTAVIAAFLAVGGVENIFDSVVTAVAAFDVAGQKSEAKNAYVGTASFAEGVIDSLSILQASELRTEAKIEER

SEQ ID NO: 148 - DNA, 780 bp, Lachnospiraceae bacterium
atgcaggaagaacttattgagcaaattcgcgtaaatagaccacttgtacattgtattacaaatcaggttacagttaactatgttgtgaacatgcttctcgggcttggcgctcgtgctgaaggtacagacgcaccggaagaagctgctgagatcgcaggcagaagccaggctcttatgcttaatgtaggtgcacccacagagtcgcttgcaaattctatgatagaagcaggacgacgcgcaaatgaaatgggtgttccggttgtactcgatcctgatggagtaggaaagtcaagcttcagacttgagattgtaaacgagatacttaacagtgtatatgttacatgcatacgtggtacagcgactgatcttgctgcattaaacggctgggaacttgaagaaaatgcaacactttccttggatgatcttcagattattgccgataaatataatgtatgtgtggtcatgacaggtcaggaagatctggttgtttaccatgctagtcaggcacgtataagcaataatataccttttatgaagagagttgccggaagcggcgcagcactcacagcggtcatcgctgcattcctggctgttggcggagttgagaatatatttgattctgtcgttacagctgttgcagcatttgatgttgctggacagaagtcagaagcaaagaacgcttacgtcggtacagcatcatttgctgagggcgttattgatagtctgagcattcttcaggcctctgaacttagaacagaagcaaagatagaggaacgttaa

SEQ ID NO: 149 - DNA, 790 bp, Artificial sequence
  Codon optimised sequence
atgcaggaagaactgattgaacagattcgtgtgaatcgtccgctggttcattgtattaccaatcaggttaccgtgaattatgtggtgaatatgctgctgggcctgggtgcccgcgcagaaggtaccgatgcaccggaagaagccgccgaaattgccggtcgtagccaggcactgatgctgaatgttggtgccccgaccgaaagcctggcaaatagcatgattgaagcaggccgccgcgccaatgaaatgggtgttccggtggtgctggaccctgatggcgtgggcaaaagcagcttccgcctggaaattgtgaatgaaattctgaatagtgtgtacgtgacctgtattcgtggcaccgccaccgatctggcagcactgaatggttgggaactggaagaaaatgcaaccctgagcctggatgatctgcaaattattgccgataaatataacgtgtgcgtggtgatgaccggccaggaagacttagtggtgtatcatgccagccaggcccgtattagcaataatattccgttcatgaaacgcgttgcaggtagtggtgcagccctgaccgccgttattgcagccttcctggcagtgggcggtgtggaaaatatcttcgatagcgtggtgaccgcagttgcagcattcgatgtggccggtcagaaaagtgaagcaaaaaatgcctatgtgggcaccgcatcattcgccgaaggtgtgattgatagcctgagcattctgcaagccagcgaactgcgtaccgaagcaaaaattgaagaacgttgactgaaagctt

SEQ ID NO: 150 - protein, 283 aa, Globicatella sulfidifaciens
MHEQMTFYLNQIVEQNPLINCLTNKVTTNFQANALLAIGASPIMTDEPDASPLVSAQSQAIVINIGSPFNQDKMEAIELSIKAAIDKQIPVIIDPVGVAALSNRLAYIEHLLSEYEIAAVCGNYSEIAALAGAKSNGKGVDGGHPEGEMTDHLLKVANLYQTVVVATGKTDYIANQTAVYAHQYGDALLGYVTGTGCVATTIVAAFISQAPTPADYLTAATLATGFYAWCGGRAVQLTTGPGDLPIHLLNQLYEHSVKANNKKTSDKELTNLTITQERMSSND

SEQ ID NO: 151 - DNA, 852 bp, Globicatella sulfidifaciens
atgcatgagcaaatgacgttttatctcaatcaaatcgtcgaacaaaaccctttaatcaattgtttaactaataaagtgaccaccaatttccaggccaatgccctattagccattggtgcttcaccgattatgaccgatgaaccggatgctagtcctttagtatcggcacaatctcaagcgattgtcattaatatcggttccccatttaatcaagataaaatggaggcgattgagctttccataaaagcggccattgacaaacaaattccggtcatcatcgatccggtcggagtagcggcactttccaatcgtcttgcttatattgaacatttactaagcgaatacgagatcgcggctgtttgcggtaattattccgaaattgctgccttagctggagcgaaaagtaatggtaaaggtgtggatggtggtcatcctgaaggtgaaatgaccgatcatttactaaaagtagccaacctttatcaaacagtggtggtggccactggcaaaactgattatatcgctaatcaaactgctgtctatgcccatcaatatggcgacgctttactcggttatgtgaccggcaccggctgtgtcgcgacgaccatcgtcgctgcttttatcagtcaagcgcctacgccagctgactatttaacggctgccactttagcgaccggattttatgcttggtgtggaggccgggcagttcaattgactaccggacctggtgatttaccaattcatttattaaaccaattatatgaacactcagtcaaagcaaataataaaaaaacatctgataaagaattaacaaacttaacaattacacaagaaaggatgtcaagcaatgactaa

SEQ ID NO: 152 - DNA, 862 bp, Artificial sequence
  Codon optimised sequence
atgcatgaacagatgaccttctatctgaatcagattgtggaacagaatccgctgattaattgcctgaccaataaagttaccaccaacttccaggccaatgccctgctggcaattggtgccagcccgattatgaccgatgaaccggatgccagtccgctggtgagtgcccagagtcaggccattgttattaatattggcagtccgttcaatcaggataaaatggaagcaattgaactgagtattaaggcagccattgataaacagattccggtgattattgatccggtgggtgtggcagcactgagtaatcgtctggcatatattgaacatctgctgagcgaatatgaaattgcagcagtgtgcggcaattatagcgaaattgccgccctggcaggtgccaaaagtaatggtaaaggtgttgatggtggccatccggaaggcgaaatgaccgatcatctgctgaaagtggcaaatctgtatcagaccgttgtggttgcaaccggcaaaaccgattatattgcaaatcagaccgcagtgtatgcccatcagtatggcgatgccctgctgggctatgttaccggtaccggttgcgtggccaccaccattgttgcagcattcattagtcaggccccgaccccggccgattatctgaccgccgcaaccctggccaccggcttctatgcctggtgcggcggccgtgcagttcagctgaccaccggtccgggcgatctgccgattcatctgctgaatcagctgtatgaacatagcgttaaagcaaataataagaagaccagtgataaggaactgaccaatctgaccattacccaggaacgtatgagcagtaatgattgactgaaagctt

SEQ ID NO: 153 - protein, 279 aa, Aerococcus urinae
MSKKTSIPFAKYSQQVKAKAPLIQVLNNYVTIHDVANVILASGGRPVMTDKLPNSQDVVKSADLLLLNAASPRPNQELLDLATTAKNDHHPVVLDPVGVSAMPSKLKLCQDLIDRGLVTAVKGNASEIRSLLFEKSQGSGVDLGPGDEVTLANLADFAPDFKAYAQEKEIILAMSGPIDLVTDGERLAIIKNGHPWMASYTGSGCQLSGVLASFLAGNPDEDPFYLATAAMISYGVAGEIAAQVLQPYEGNATYSNRVIDQVSLLEAKELERRAKYDIQ

SEQ ID NO: 154 - DNA, 840 bp, Aerococcus urinae
atgtctaaaaaaacaagcattccctttgcgaaatatagtcagcaggtcaaggccaaggccccgctgatccaagtcttaaataattatgtcaccatccatgatgtggccaatgtgattttggccagtggcgggcgtcccgtgatgaccgataaattacctaatagccaggatgtggtcaagtcggctgaccttttgctcctaaatgctgctagccccagacctaatcaggaattgttggacctcgccaccacagcaaaaaatgaccaccatcccgtggtcttagacccagtgggggtttcagctatgccgtctaaattaaagctctgtcaggatctgattgaccggggtctagtgacggcggtgaaggggaatgcttcggaaattcgtagcctcctctttgaaaaaagccaaggatctggggtcgacctgggtcctggagacgaggtgaccttagctaatttggctgattttgctccggactttaaagcttatgcccaagaaaaagagattatcctagccatgtcaggtccgattgacttagtgactgacggcgaacggctggcaatcattaaaaatggtcacccctggatggcctcctatacgggatcaggttgccagttaagcggcgtcctagctagctttttagccggtaatccggatgaggatcctttttacctagctacagcagccatgattagctatggggtggcgggagaaatcgctgctcaagtgctccagccctatgagggtaatgccacttattccaaccgggtgattgaccaggtctccttattagaggccaaagaattagaaaggagagccaagtatgacattcaataa

SEQ ID NO: 155 - DNA, 850 bp, Artificial sequence
  Codon optimised sequence
atgagtaagaagaccagcattccgttcgccaaatatagtcagcaggtgaaagccaaagccccgctgattcaggtgctgaataattatgttaccattcatgatgtggcaaatgtgattctggcaagcggtggtcgtccggttatgaccgataaactgccgaatagccaggatgttgtgaaaagtgcagacttactgctgctgaatgcagcaagcccgcgtccgaatcaggaactgctggatctggccaccaccgccaaaaatgatcatcatccggtggtgctggaccctgttggcgtgagcgccatgccgagcaaactgaaactgtgtcaggatctgattgatcgtggcctggttaccgccgttaaaggtaatgcaagtgaaattcgcagcctgctgttcgaaaaaagtcagggtagcggcgttgatctgggcccgggtgatgaagttaccctggccaatctggccgacttcgcaccggacttcaaagcctatgcccaggaaaaagaaattattctggcaatgagcggcccgattgatctggttaccgatggtgaacgtctggccattattaaaaatggtcatccgtggatggcaagttataccggcagtggttgtcagctgagtggtgtgctggccagcttcctggccggcaatccggatgaagatccgttctatctggccaccgcagcaatgattagctatggcgttgcaggcgaaattgccgcccaggtgctgcaaccgtatgaaggtaatgccacctatagcaatcgtgtgattgatcaggtgagtctgctggaagccaaagaactggaacgccgtgcaaaatatgatattcagtgactgaaagctt

SEQ ID NO: 156 - protein, 273 aa, Blautia obeum
MSLNNIEEISFCIHQDAPKIHCLTNPVTMQDVANLLLAAGGSAVMGQDEQEVEEITSFCHGALLNTGVPDIAKIQACILAGQKANALDHPVVLDPVGAGASTFRRKELQKLLQAVHPTAVRCNQEEAVVLCSLLSDTDSPEKHGGVESSLQMAERDVCLIAGQAASLLNCTVLITGREDVVSDGKQTQILTGGDSRIRRITGGGCMLSALCTLFLCTDTSAFDAVRAAGALWRETALEAGRRTDAEKSGIGSFHVHLFDVLEEKLMYTSKHKF

SEQ ID NO: 157 - DNA, 822 bp, Blautia obeum
atgtcacttaataatatagaagaaatttctttctgcattcaccaggatgctcccaagattcattgtctcactaatccggtaaccatgcaggatgttgccaatctactgcttgcagccggcggaagtgccgtaatgggacaggatgaacaggaagtcgaagaaatcacttctttctgtcatggagcccttctgaataccggagtaccggacattgccaaaatacaggcctgcatccttgccggacagaaggcaaatgcccttgaccacccggtcgtcctggatccggtcggcgccggtgccagcacatttcgaagaaaagagctgcaaaaacttcttcaagccgttcatccgactgctgttcgctgtaatcaggaagaagccgttgttctatgttctcttctttcagataccgacagtcccgagaaacacggcggtgtagaaagttccctgcagatggcggaacgtgatgtctgtctgattgcagggcaggcggcatctcttctcaactgcacagttctgatcacgggcagagaggatgtggtatctgatggaaagcagacacagattctgaccggcggtgactccaggattcgacgaatcaccggtggcggatgtatgctttctgcactctgcacattatttctgtgtacggacacttctgcatttgatgcggtccgtgccgccggagcactctggcgtgaaactgcccttgaagcaggcagacgaacagacgcagaaaaatccggtattggaagttttcatgtacatctttttgatgtactggaagagaaattaatgtacacctcgaaacataaattctga

SEQ ID NO: 158 - DNA, 832 bp, Artificial sequence
  Codon optimised sequence
atgagtctgaataacatcgaagaaatcagcttctgtattcatcaggatgcaccgaaaattcattgcctgaccaatccggtgaccatgcaggatgtggcaaatctgctgctggcagccggtggtagtgcagttatgggtcaggatgaacaggaagtggaagaaattaccagcttctgccatggcgccctgctgaataccggtgtgccggatattgccaaaattcaggcatgcattctggcaggccagaaagcaaatgccctggatcatccggtggttctggaccctgtgggcgccggtgccagcacattccgccgtaaagaactgcaaaaactgctgcaagccgtgcatccgaccgcagttcgttgcaatcaggaagaagcagttgttctgtgtagcctgctgagtgataccgatagcccggaaaaacatggtggcgttgaaagcagtctgcaaatggcagaacgcgatgtgtgtctgattgccggtcaggccgccagtctgctgaattgtaccgtgctgattaccggtcgcgaagatgtggttagtgatggcaaacagacccagattctgaccggcggtgatagtcgtattcgccgcattaccggcggcggttgcatgctgagcgcactgtgcaccctgttcctgtgcaccgataccagtgcattcgatgccgtgcgtgccgccggtgcactgtggagagaaaccgccctggaagccggtcgccgtaccgatgccgaaaaaagcggcattggcagcttccatgtgcatctgttcgatgttctggaagaaaaactgatgtataccagcaaacataaattctgactgaaagctt

SEQ ID NO: 159 - protein, 281 aa, Rhodococcus erythropolis
MSDTVSVETVASAIDALRDQVPLVQSLTNIVSANFLTNVLLAAGASNAHIDNVHEAGGFAAVAGGVLVNLGTPDDGTAEAFLISAEAARTAGTPWVLDPVGVGGLPWRSGIAVDLLRFHPSAIRGNASEIIALAGLGGDTRGVDSASDSADAVPAALSLLTHADAVSASGPVDYIVGRDGGGDVRGIRVSGGSALLPRVTSTGCSLGGLVAAYLAVTPTALDGLVAAHTHVAVASEIAEENASGPGSFAVAYLDALYTVNADTIRSRARIESFDLPAGVQN

SEQ ID NO: 160 - DNA, 846 bp, Rhodococcus erythropolis
atgtctgacactgtctctgtcgaaaccgtcgcgtcggcgatcgacgcactccgcgatcaggtaccgctcgtccagtcgctgacgaacatcgtttcggcgaacttcttgaccaatgttctgctcgctgccggcgcaagcaacgctcacatcgacaacgttcatgaagcgggtgggttcgctgccgtcgccgggggagtgctcgtcaacctcggaacgccggacgacgggacagccgaagccttcctgatttccgcagaagcggcccgaactgccggtacgccatgggttttggatccagtcggtgtcggcggactaccctggcggagcggtatcgctgtggatctgctgcgctttcaccccagcgccatccgcgggaacgcatcggagatcatcgctctggccggactcgggggtgacacccgcggcgtcgacagtgcctccgactccgccgacgcagtgcccgccgctctgtcactcctgacgcatgcggatgccgtgtcggcatcaggcccggtcgactacatcgtcggccgcgatggtggcggcgacgttcggggcatccgagtctccggtggcagcgctctgttgccgcgcgtgaccagtaccggttgctctctgggaggcctggtcgctgcctacctcgccgttacgccgaccgcgctggacggattggttgccgcgcatacgcacgttgccgtggcatcggagatcgccgaggaaaatgcctcaggtcctggttctttcgcggtcgcgtacctcgacgcgctctacaccgtgaatgcggacaccatccgctcacgtgcccgaatcgaatcgttcgacctgccggctggagtgcagaactga

SEQ ID NO: 161 - DNA, 856 bp, Artificial sequence
  Codon optimised sequence
atgagcgataccgtgagtgttgaaaccgtggccagtgcaattgatgcactgcgcgatcaggttccgctggttcagagtctgaccaatattgttagtgcaaacttcctgaccaatgttctgctggccgccggcgcaagtaatgcccatattgataatgttcatgaagcaggcggcttcgcagcagttgcaggtggcgttctggtgaatctgggcaccccggatgatggtaccgcagaagccttcctgattagcgccgaagccgcacgtaccgcaggcaccccttgggtgctggaccctgttggtgttggcggtctgccgtggcgtagtggtattgccgtggatctgctgcgcttccatccgagtgccattcgtggtaatgcaagcgaaattattgccctggcaggtctgggcggcgatacccgtggtgtggatagtgccagtgatagcgcagatgccgttccggccgccctgagtctgctgacccatgcagatgccgtgagcgccagcggtccggtggattatattgtgggccgtgatggtggtggtgatgtgcgcggcattcgcgtgagcggtggcagtgcactgctgccgcgcgttaccagtaccggctgtagcctgggtggcctggttgccgcatatctggccgtgaccccgaccgccctggatggtctggtggccgcacatacccatgtggccgttgcaagtgaaattgccgaagaaaatgcaagtggcccgggcagcttcgccgtggcttatctggatgccctgtataccgttaatgcagataccattcgcagccgcgcccgcattgaatcattcgatctgccggcaggcgtgcagaattgactgaaagctt

SEQ ID NO: 162 - protein, 274 aa, Synergistales bacterium
MIRPADPGKVWESIRKKRPLVYQLTNTVAASFQAEVTAAAGAAVVMSSHPGEARVIASGADALLLNTGTPGGTSQEAFIEALGGLRKGKPCLLDAVGYGLTPFRTGWINSLLEGGRVTAVKGNAAEMARLGGGSGSMKGVESSRAHGVEKALKEITKSETAPVVAVATGKVDKIACGGSLWKVRGGAGLLPQVPASGCALGSVMAACMAVTDPLSAATAALLAFRMAAERAPGAAGPASWRNAFVDALAALEPEKLSSGMKERVEGPFPLEVLP

SEQ ID NO: 163 - DNA, 825 bp, Synergistales bacterium
atgatccgcccggccgatccgggaaaagtctgggagagtatcagaaaaaaacgtccgttggtctatcagcttaccaatacagtggccgcatcctttcaggccgaggtgaccgccgccgcgggcgccgctgtggtcatgtcgtcccaccccggggaagcccgggtgatcgcgtccggggcggatgctctccttttgaacacgggaacgcccggggggacctctcaggaggctttcattgaagctttaggcggattgcggaaggggaagccctgtctgctggatgccgtggggtacggtctcacccccttccggacgggctggatcaattcactcctggaaggtggccgagtcacagccgttaagggaaacgcggctgaaatggcacgcctcggcggcggatcgggttccatgaaaggcgtggagagttcccgagcccacggggtggaaaaggccctgaaagagataacgaaaagcgaaacggcacccgttgtggccgttgcgacaggaaaggtcgacaaaatagcctgtggcgggtcgctttggaaagtccggggaggggcggggttgcttccgcaagttccggcaagcggctgtgcccttgggagcgtcatggcggcctgcatggccgtgacagaccccctttcggccgccaccgcggcccttctggccttccggatggcggctgagcgggcacccggcgctgcagggccggcttcctggagaaacgcctttgtcgacgcccttgccgccctggagcctgaaaagctttccagcggcatgaaagaacgtgtggagggcccgttccctctggaggttttgccatga

SEQ ID NO: 164 - DNA, 835 bp, Artificial sequence
  Codon optimised sequence
atgatccgcccggcagatccgggcaaagtgtgggaaagtattcgcaaaaaacgtccgctggtgtatcagctgaccaataccgttgcagccagcttccaggcagaagttaccgcagccgcaggtgcagccgtggtgatgagcagtcatccgggtgaagcccgcgtgattgccagcggtgcagatgccctgctgctgaataccggtaccccgggcggcaccagtcaggaagcattcattgaagcactgggtggtctgcgcaaaggcaaaccgtgtctgctggatgcagtgggctatggtctgaccccgttccgtaccggctggattaatagtctgctggaaggtggccgcgttaccgcagtgaaaggcaatgccgcagaaatggcacgtctgggcggtggtagtggcagcatgaaaggtgtggaaagcagtcgcgcacatggtgttgaaaaagcactgaaagaaattaccaaaagcgaaaccgccccggttgtggcagtggccaccggtaaagttgataaaattgcatgtggcggtagtctgtggaaagttcgcggtggcgcaggtctgctgccgcaggttccggctagtggctgtgcactgggtagtgttatggccgcatgtatggccgtgaccgatccgctgagcgccgccacagcagccctgttagccttccgtatggcagccgaacgtgccccgggtgcagcaggtcctgccagttggcgtaatgccttcgtggatgccctggccgccctggaaccggaaaaactgagtagcggcatgaaagaacgtgttgaaggcccgttcccgctggaagttctgccgtgactgaaagctt

SEQ ID NO: 165 - protein, 299 aa, Pelagibaculum spongiae
MLVKQELKVEMEIRRGAMSTVSTSPQQSFESPVEQQLSELLIAVRTKKPLVHNITNYLAMNISANALLALGASPIMAHSREEASELCRISQALVINIRTLSSGWAEAMVDTAMTARAHNIPWVLDPDGADISSYRMDTCQELAGLSPKVIRGNLKEIAALCADCEPELTPAQMAKADLDQLLPAILSCASRRSSVLCISGLTDNIHLVTDGERVLKVANGDALSSQVAAMGCTASALVGAFLTVTDDAWLATAAAIALLGVACELAASQAKGPGSFQAELMDQLYLIQSDQLAARLRLL

SEQ ID NO: 166 - DNA, 900 bp, Pelagibaculum spongiae
ttgcttgtaaagcaagaattaaaagtagaaatggagatccggaggggcgctatgtcgacagtttctacttcaccgcagcaatcatttgaatcgccggttgagcagcagttatcggaattgttaattgctgtgagaacaaaaaagccattggttcataatattaccaactatttggcgatgaatatttctgctaatgcactgttggcattgggtgctagcccgattatggcgcatagccgtgaagaagcttcggagctttgccgaatttcccaagcgttagtcatcaacattcgaaccctgtcttcaggttgggccgaagcgatggttgatactgccatgaccgctcgagcgcataatattccctgggtattagatcctgatggtgcagatatcagtagctatcggatggacacttgccaagagttagcaggactttctcctaaggtaattcgtggcaacctgaaagaaattgctgcactttgtgctgactgcgagcctgaattaacgccagcgcaaatggctaaggccgatcttgatcagctattacccgcaatattatcttgtgccagtcgtcgttccagcgtgctttgcattagtggccttactgataatattcatttggtcactgatggtgaacgagtgttgaaagttgccaatggtgatgcgctttcaagccaagttgcggcgatgggatgtaccgccagtgcattggtaggtgctttcctaacggtcaccgatgacgcatggttagcgactgcagcggcaattgccttgctcggagttgcctgtgagttggctgccagtcaggcaaaagggccgggtagttttcaagctgagttaatggatcaattgtatctaattcagtcagaccaattagccgcgcgtttgcggctgttgtaa

SEQ ID NO: 167 - DNA, 910 bp, Artificial sequence
  Codon optimised sequence
atgctggtgaaacaggaactgaaagtggaaatggaaattcgtcgcggtgcaatgagcaccgttagtaccagcccgcagcagagcttcgaaagcccggttgaacagcagctgagcgaactgctgattgccgttcgtaccaaaaaaccgctggttcataatattaccaattatctggcaatgaacatcagcgcaaatgccctgctggccctgggcgcaagtccgattatggcacatagtcgtgaagaagccagtgaactgtgtcgcattagtcaggcactggtgattaatattcgcaccctgagcagtggttgggcagaagccatggtggataccgccatgaccgcccgcgcccataatattccgtgggtgctggaccctgatggcgcagatattagcagctatcgcatggatacctgccaggaactggccggcctgagcccgaaagttattcgtggcaatctgaaagaaattgcagcactgtgtgccgattgtgaaccggaactgaccccggcccagatggccaaagccgatctggatcagctgctgccggcaattctgagctgcgccagccgtcgtagcagtgtgctgtgtattagtggtctgaccgataatattcatctggtgaccgatggtgaacgtgtgctgaaagtggccaatggtgatgcactgagcagtcaggtggccgcaatgggttgtaccgccagcgcactggtgggtgccttcctgaccgttaccgatgatgcctggctggcaaccgcagcagcaattgcactgctgggtgtggcctgcgaactggccgcaagccaggcaaaaggcccgggcagcttccaggccgaactgatggatcagctgtatctgattcagagtgatcagctggccgcccgcctgcgtctgctgtgactgaaagctt

SEQ ID NO: 168 - protein, 261 aa, Firmicutes bacterium
MIKDIIQNVYSKRPLVHNITNYVAATDCANITLTIGASPIMADEPKEVGEVTQIADGLVLNCGTISESRLNAMLISGKTAKSREIPIVLDPVGVGISKFRTIAVHKIITEVKPDIIRLNASELKSICLNIKNMSGVDAVNIDSFDDTVELAKNLSLKTNAIIGVSGISDIVTDGKNTAVISGGHAMMKKITGSGCMLSSVIGAFAAANPNNLFYALSVAFGLYASCGRNAYKENIGIATYKNNFFDEMTNPDLEGIEIEYR

SEQ ID NO: 169 - DNA, 786 bp, Firmicutes bacterium
atgataaaagacattatacaaaatgtttattcaaaacgtccgcttgttcataacataaccaactacgttgccgcaacggattgtgcaaatataacattgacaattggtgcgtcaccaattatggctgatgagcctaaggaagtcggtgaagtaacacaaattgccgacggacttgttttaaactgcggaacaatttccgaaagtcgattaaacgctatgcttatatccggtaaaacagcaaagtcaagagaaatacctatcgttcttgacccagtcggagtaggcatttccaaattcagaacaattgccgttcataaaataattacggaagtaaaacccgatattataagacttaatgcatcggaacttaaaagcatttgtcttaacattaaaaatatgtcgggtgtggacgccgttaatattgacagttttgacgatactgttgagcttgcaaaaaatctttcgcttaagaccaacgcgattataggtgtaagcggtatatcggatattgttacagacggcaaaaataccgccgttatttcaggcggacacgcaatgatgaaaaaaattacaggctccggctgtatgctttcatctgttatcggtgcatttgccgccgcaaatccgaataatcttttttatgcgctatctgttgcattcggtttatatgcaagttgcggaagaaacgcatacaaagaaaatataggtatcgcaacatataaaaacaacttttttgatgaaatgacaaatcctgatttggaggggattgaaattgaatatagataa

SEQ ID NO: 170 - DNA, 796 bp, Artificial sequence
  Codon optimised sequence
atgatcaaggatatcatccagaatgtgtatagtaaacgcccgctggttcataatattaccaattatgtggccgccaccgattgtgccaatattaccctgaccattggtgcaagtccgattatggcagatgaaccgaaagaagtgggcgaagttacccagattgccgatggcctggttctgaattgcggtaccattagtgaaagccgtctgaatgccatgctgattagcggcaaaaccgcaaaaagtcgtgaaattccgattgtgctggaccctgttggcgttggcattagtaaattccgtaccattgcagtgcataaaattattaccgaagttaaaccggatatcattcgtctgaatgcgagtgaactgaaaagtatctgtctgaatattaagaacatgagtggtgttgatgcagttaatattgatagcttcgatgataccgttgaactggccaaaaatctgagtctgaaaaccaatgcaattattggcgttagcggcattagtgatattgttaccgatggcaaaaataccgcagtgattagtggtggccatgccatgatgaaaaaaattaccggcagcggttgcatgctgagcagcgttattggtgcattcgccgcagccaatccgaataatctgttctatgccctgagcgtggcattcggtctgtatgccagctgtggtcgtaatgcctataaagaaaatattggtatcgccacctataaaaataacttcttcgatgaaatgaccaacccggatctggaaggcattgaaattgaatatcgctgactgaaagctt

SEQ ID NO: 171 - protein, 263 aa, Euryarchaeota archaeon
MPRHGAAVNLVKWGGSLITDKAAAKPTPQRERITALAAALAANDAPAVLVHGAGSFGHPLAKRFGLAQGSDGSPEQAAAVARTRQQVRTLNALVCEALATAGLEPVPILPSQALRTAGPQNIVDFPASSFEAALEAGRIPVTCGDVTDDDSQGIAILSGDTLMLALARALRPQRALFVINHSGVMDRDPAEPGAKLIAHLNGDARTEMRAQRMDVPGADVTGGMWGKLEAAAAIARECECRIIGAGGFAAALTGDPAGTLVLP

SEQ ID NO: 172 - DNA, 792 bp, Euryarchaeota archaeon
  misc_feature (80)..(80): n means a or g or c or t
  misc_feature (171)..(171): n means a or g or c or t
  misc_feature (252)..(252): n means a or g or c or t
  misc_feature (518)..(518): n means a or g or c or t
ctgccccgccatggagctgccgtgaacctcgtcaagtggggcggctcgctcatcaccgacaaggcggccgcgaagccgangccacaacgcgagcgcatcacggcgctggctgcggcgctcgccgccaacgacgcgccggcggtgctggtgcacggcgccggttctttcggncacccgctcgcaaagcggttcgggctggcgcagggaagcgacggctcacccgagcaggcggcggcggtcgcgcggacgcgncagcaggtgcgcacgctcaacgcgctggtttgcgaagcgctcgccacggcgggactggaacctgttccaatcctgccgtcgcaggcgctgcgcaccgctggcccgcaaaacatcgttgatttccccgcgagcagcttcgaggcggcgctggaggcgggccgtatcccagtcacctgcggcgacgtcaccgacgacgattcacagggcatcgccattttgagcggcgatacgctgatgctcgcgctggcgcgcgcgctgcgaccgcngcgcgcgttgttcgtcatcaaccactcaggagttatggatcgcgacccggccgagccgggcgcgaaactgatcgcgcatctcaacggggacgcccgcacggagatgcgcgcgcagcggatggatgtgccgggcgccgacgtcacaggcgggatgtggggcaagctcgaggcggcggccgccatcgcccgcgaatgcgagtgccgcatcatcggcgcgggcggcttcgcagcagcactcacaggcgacccagctgggacgctggtgctgccgtga

SEQ ID NO: 173 - DNA, 802 bp, Artificial sequence
  Codon optimised sequence
atgccgcgtcatggtgccgcagttaatctggttaaatggggtggtagcctgattaccgataaagccgccgccaaaccgaccccgcagcgcgagagaattaccgccctggcagcagccctggcagccaatgatgcaccggccgtgctggttcatggcgcaggcagcttcggtcatccgctggccaaacgcttcggtctggcccagggcagtgatggcagtccggaacaggcagcagccgttgcccgtacccgtcagcaggttcgcaccctgaatgcactggtgtgtgaagccctggcaaccgccggtctggaaccggttccgattctgccgagtcaggcactgcgcaccgcaggccctcagaatattgttgacttcccggccagcagcttcgaagccgcactggaagccggccgcattccggtgacctgtggcgatgtgaccgatgatgatagtcagggcattgccattctgagcggtgataccctgatgctggcactggcacgcgcactgcgtccgcagcgtgctctgttcgttattaatcatagcggtgtgatggatcgcgatccggcagaaccgggtgccaaactgattgcacatctgaatggcgatgcccgtaccgaaatgcgtgcccagcgtatggatgttccgggtgccgatgttaccggtggtatgtggggcaaactggaagccgccgccgcaattgcccgcgaatgcgaatgtcgcattattggcgccggtggcttcgcagccgcactgacaggtgatccggccggtaccctggtgctgccgtgactgaaagctt

SEQ ID NO: 174 - protein, 251 aa, Methanocorpusculum parvum
MNEPVIIKLGGSIVTKKSEDGVVDSAKIKLLAEQIAPFAGKFPLIIVHGAGSCGHPEAKAYDIPGGVTKANAAGIFVTHTAVSRLNRSVVASLREAGMEAVSLHPFGCCLAENGRLVSAGVSQIKEMLSLSLIPVLHGDVVMDTKRGACIISGDQIVPYLAVKLGAKRVGIATDVGGVLENGEVIPEINRKNVGEIDLGGSSSTDITGGMRGKIDELLLLADEGIDSHIFAANRVADFLLGKNYGGTLVRK

SEQ ID NO: 175 - DNA, 756 bp, Methanocorpusculum parvum
atgaatgaaccagtcattatcaaactcggcggaagcatcgttacgaaaaaatccgaagacggggtcgtcgattcggcaaagatcaaactccttgccgagcagatcgcaccgtttgccggaaaattccccctcatcatcgtgcacggggcaggttcctgcgggcatcccgaggcaaaagcctatgatatcccgggcggcgtgacgaaagcaaacgccgcaggtatttttgtaacgcacacggcagtgtcccggctcaaccgctcggtcgtagcctcgcttcgtgaagccggcatggaagccgtctcgcttcatccgttcggctgctgtcttgcggagaacggccgccttgtctcggcaggtgtttcgcagatcaaagagatgctttccctaagtctcatcccggtcctgcacggggatgtggtcatggacacaaaacgcggcgcctgtattatctccggcgatcagatcgtcccctaccttgccgtcaaactcggcgcaaaacgcgttgggatcgcgaccgatgtcgggggcgttcttgaaaacggtgaagtcatcccggagatcaaccggaaaaacgtcggtgagatcgatctcggcggctcttcgagcaccgacataaccggcggcatgcgtggaaagatcgatgaacttctccttctcgccgatgaagggatcgactcgcacattttcgccgcgaaccgtgtggcggatttcctcttgggaaaaaattacggcgggacactggtaagaaaatga

SEQ ID NO: 176 - DNA, 766 bp, Artificial sequence
  Codon optimised sequence
atgaacgaaccggttattattaagctgggtggcagcattgttaccaaaaaaagtgaagatggtgttgttgatagtgcaaaaattaaactgctggccgaacagattgcaccgttcgccggtaaattcccgctgattattgtgcatggcgccggtagttgtggccatccggaagccaaagcatacgatattccgggtggtgttaccaaagcaaatgcagccggtatcttcgtgacccataccgcagtgagtcgcctgaatcgcagcgttgttgccagtctgcgtgaagcaggtatggaagcagttagtctgcatccgttcggttgttgtctggcagaaaatggccgtctggttagtgcaggtgttagccagattaaagaaatgctgagtctgagcctgattccggtgctgcatggtgatgtggtgatggataccaaacgtggtgcctgtattattagtggtgatcagattgtgccgtatctggccgttaaactgggcgcaaaacgcgttggcattgccaccgatgtgggtggcgtgctggaaaatggtgaagtgattccggaaattaatcgcaaaaatgtgggcgaaattgatctgggcggcagcagcagcaccgatattaccggcggcatgcgcggcaaaattgatgaactgctgctgctggcagatgaaggcattgatagccatatcttcgcagcaaatcgcgtggcagacttcctgctgggcaaaaattatggtggtaccctggtgcgtaaatgactgaaagctt

SEQ ID NO: 177 - protein, 267 aa, Ardenticatena maritima
MNCIFVKLGGSLLTDKTARYAARHDVLARLAREIAAARHANPDLALVLAHGSGSYGHVAARETGYDRERGHRDVLAYARVAAAAATLNSLVRAALLACDIPAVSLPPSASALVEGGRLVRMAWDPFARILAWGGVPLTYGDVALTETGGTIVSTETVLLALAEQLPPTRLLLLTDVPGVFAHPPTGDTTPPLLERITPATWPEQRAGVQGARGTDVTGGMVRKVEQMLALVERLPQVEVIIASGRTPGLLQRALLGEDVPGTRIVRA

SEQ ID NO: 178 - DNA, 804 bp, Ardenticatena maritima
atgaattgcatcttcgtcaaacttgggggctcgctcctgaccgacaaaaccgcccgctacgccgcccgccatgacgtcttggcgcggctggcgcgtgaaatcgccgcggcgcgccacgccaaccccgacctggcgctggtgctcgcccatggcagcggctcttacgggcatgtcgccgcgcgcgaaacaggctacgaccgcgagcgggggcatcgcgatgtgctggcgtatgcacgggttgccgccgccgccgcgacgctcaacagcctggtgcgggcggcgttgctggcgtgcgatattcccgccgtctcgttgccgccttcggcgtcggcgctggtggaaggggggcggctggtgcgcatggcgtgggaccccttcgcccgcattctggcgtgggggggcgtcccgctcacctatggcgatgtggcgctgacggagacgggcggcaccatcgtttccaccgaaaccgtattgctggcgctcgccgagcagttgccgccgacgcgcctgctcctgctgactgacgtgcccggcgtttttgcgcatccccccacgggcgacacgacgccccctctgctggaacgcattacgcccgccacctggcccgaacagcgcgccggtgtgcagggcgcccgcggcaccgacgtgacggggggcatggtgcgcaaggtggagcagatgttggcgctggtggaacgcttgccgcaggtggaagtcatcatcgcgtccgggcggacgcccggcctgttgcagcgggcgttgctgggggaagatgtgcccggcacgcgcatcgtgcgggcgtga

SEQ ID NO: 179 - DNA, 814 bp, Artificial sequence
  Codon optimised sequence
atgaactgtatcttcgtgaaactgggcggcagcctgctgaccgataaaaccgcacgttatgcagcccgtcatgatgttctggcacgtctggcccgtgaaattgccgcagcacgtcatgcaaatccggatctggccctggttctggcccatggtagtggcagttatggtcatgttgccgcccgtgaaaccggctatgatcgtgaacgtggccatcgcgatgtgctggcctatgcccgtgttgcagccgccgcagcaaccctgaatagtctggtgcgtgccgcactgctggcctgtgatattccggcagtgagcctgccgccgagcgcatcagcactggttgaaggcggtcgcctggtgcgtatggcatgggacccgttcgcacgcattctggcatggggcggcgttccgctgacctatggtgatgtggccctgaccgaaaccggtggcaccattgtgagtaccgaaaccgtgctgctggcactggcagaacagctgccgccgacccgcctgctgctgttaaccgatgtgccgggcgtgttcgcacatccgccgaccggtgataccaccccgccgttactggaacgcattaccccggcaacctggccggaacagcgcgcaggtgtgcagggtgcccgtggtaccgatgttaccggtggtatggtgcgtaaagttgaacagatgctggccctggtggaacgtctgccgcaggttgaagttattattgcaagcggtcgcaccccgggcctgctgcaacgtgcactgctgggtgaagatgtgccgggtacccgtattgttcgcgcctgactgaaagctt

SEQ ID NO: 180 - protein, 242 aa, Thermoplasmatales archaeon
MIAIKLGGSFITDKSKYRTFRKYETERALKGIIKFGEPFVLVHGAGSFGHILCKQSGFPGTYKGKESQLSRVKYDTCSLNSMITEILLDLGMAPMSFSPFHLRRKDTFDYSSVLRSVEGGFLPVMYGDIYIDGNDVKIYSGDSIMFDICNLLNPTDAIFMGDVDGIFDRDPKIYPESKLLKTVKKQQDFNTILNDVTGGMGGKYIAMKKIASLGIRTSMMNGLYPERLSDLHNDNFYGSVIE

SEQ ID NO: 181 - DNA, 729 bp, Thermoplasmatales archaeon
atgatcgcaataaagcttggaggaagtttcataacagataagtcaaaatatagaactttcaggaagtatgaaacggaacgggcattaaagggaataataaaatttggcgaaccatttgttctggtacacggagccggttcctttggtcacatattatgcaagcagagtggtttccccggtacttataaaggtaaagaatctcaactttccagagttaagtatgatacatgctctctgaatagcatgataacagaaatccttcttgatctgggtatggctccaatgagcttttcaccttttcatctaaggaggaaggatacctttgattactcatctgttctcaggtctgtggaaggaggtttccttcctgtaatgtatggcgatatttacattgacgggaatgatgttaagatctattccggtgacagcataatgtttgatatttgtaacctgttgaatcctacagatgcaattttcatgggtgacgttgacggaatattcgacagggatccaaagatatatcctgaaagcaaactcctgaagacagtgaaaaagcagcaggattttaacaccatattgaatgatgtaaccggcggcatgggtggaaagtacatagccatgaagaaaattgcatcacttggaataagaacctccatgatgaacggtttatatccggaaaggcttagtgatcttcataacgataacttttatggttcggtgattgaatga

SEQ ID NO: 182 - DNA, 739 bp, Artificial sequence
  Codon optimised sequence
atgatcgcaattaagctgggcggcagcttcattaccgataaaagtaaatatcgcaccttccgtaaatatgaaaccgaacgcgccctgaaaggcattattaaattcggtgaaccgttcgtgctggtgcatggtgccggtagcttcggccatattctgtgtaaacagagtggcttcccgggtacctataaaggcaaagaaagtcagctgagtcgcgtgaaatatgatacctgtagcctgaatagtatgattaccgaaattctgctggatctgggcatggccccgatgagcttcagtccgttccatctgcgccgtaaagataccttcgattatagcagtgtgctgcgcagtgttgaaggcggcttcctgccggttatgtatggcgatatctatattgatggcaatgatgttaagatatatagcggtgatagcattatgttcgatatctgtaatctgctgaatccgaccgatgcaatcttcatgggcgatgttgatggtatcttcgatcgtgatccgaaaatctatccggaaagtaaactgctgaaaaccgtgaaaaaacagcaggacttcaataccattctgaatgatgtgaccggtggtatgggcggtaaatatattgccatgaaaaaaattgcgagcctgggtattcgcaccagtatgatgaatggtctgtatccggaacgcctgagcgatctgcataatgataacttctatggcagcgttattgaatgactgaaagctt

SEQ ID NO: 183 - protein, 282 aa, Aciduliprofundum boonei
MAWSTYGISGVLAIVRDRMGLSVIKLGGSLLTDKSKPYTMRKEKFREIARELKESMDEMIIVHGVGSYGHPPVKEYKLYRGYTGKENLLNLAKTQSIVFELRLEFVRALQEEGINAMIFLPSSQIVAEGMKIKKICIEPIKRFLEMGMTPVFGGDIVVDTKMGYSVCSGDLIAAHLASELNAERLIFATDVDGIYTKDPKKDKNAKLLKEINLENMDELAKLTGSAFTDVTSGMYGKIETIRKYKNDLKNTEIVILSMLKEGNLKAYMRNMKDAKYTKIKIK

SEQ ID NO: 184 - DNA, 849 bp, Aciduliprofundum boonei
atggcctggagtacatacggtatttcaggcgttctggcaattgtgagggatagaatgggattgagtgtaataaaattgggtggctcgctgctcacagataaatcgaagccttacacaatgaggaaagaaaaatttagagaaattgctagagagttgaaagagagtatggatgagatgataatagttcatggtgtgggctcttatggacacccgcctgttaaggagtacaaactttacaggggttatacaggaaaggagaatcttttaaatttagcaaagacgcagagcatagtgtttgaattgcgtttggaatttgttagagctttacaggaagagggaataaatgccatgattttcctgccgagtagccagatagttgcagaaggaatgaagataaaaaagatttgtattgaaccaataaagagatttttagagatgggaatgactccagtgtttggtggagacattgtggttgatactaagatgggttattcagtttgttcgggagatcttattgcagcacatcttgcctctgagctaaatgctgagagattgatttttgcaacagatgtggacggaatttatacaaaggacccgaaaaaagataaaaatgcaaaattgctgaaagaaataaatctagaaaatatggatgaattggctaaattaacgggttctgctttcactgatgtgacctcaggtatgtacggcaaaatagagaccattagaaaatacaagaatgatttaaagaatacagaaatagtcattctttctatgttaaaagagggcaatttaaaagcatatatgagaaatatgaaggatgcaaaatacaccaaaataaaaataaagtaa

SEQ ID NO: 185 - DNA, 859 bp, Artificial sequence
  Codon optimised sequence
atggcatggagtacctatggtattagtggtgttctggccattgttcgcgatcgcatgggtctgagtgttattaaactgggtggtagcctgctgaccgataaaagtaaaccgtataccatgcgcaaagaaaaattccgtgaaattgcccgtgaactgaaagaaagtatggatgaaatgattatcgtgcatggtgttggtagttatggtcatccgccggtgaaagaatataaactgtatcgtggctataccggtaaagaaaatctgctgaatctggcaaaaacacaaagcattgtgttcgaactgcgcctggagttcgttcgtgcactgcaagaagaaggtattaatgcaatgatcttcctgccgagtagccagattgttgccgaaggcatgaaaattaaaaaaatctgtatcgagccgatcaaacgcttcctggaaatgggcatgaccccggtgttcggtggtgatattgttgtggataccaaaatgggttatagtgtgtgtagtggtgatctgattgcagcacatctggcaagtgaactgaatgccgaacgcctgatcttcgccaccgatgttgatggtatctataccaaagatccgaaaaaagataagaacgcaaaactgctgaaagaaattaatctggaaaacatggatgagctggccaaactgaccggtagcgccttcaccgatgtgaccagcggtatgtatggcaaaattgaaaccattcgtaaatacaaaaacgacctgaaaaacaccgaaattgttattctgagcatgctgaaagaaggtaatctgaaagcatatatgcgtaatatgaaggatgcaaaatacaccaaaatcaaaatcaagtgactgaaagctt

SEQ ID NO: 186 - protein, 252 aa, Methanohalarchaeum thermophilum
MKIIKIGGSLITDKDSYKTPDTHEINRIAREISKGINSDRLILIHGAGSFGHPLVKKFKLNKKSTNKDLFSILKVQDSVRELNRLFKDSLNKEKIPAYTIHPSSITRTENGEIIDLELNTIRQALKEGYIPLLYGDMVLDTKNRASVLSGDRLVSFLAQELKPNKVGMATTTPVLDKNNQKIDLITQTDLENIGESNSTDVTGGMLNKVNELLKTRAKSYIFNAKKRKALEKFIKGKNIGTEVEYDDKGKKT

SEQ ID NO: 187 - DNA, 759 bp, Methanohalarchaeum thermophilum
atgaaaataattaaaatcggtggaagcttaataacagataaggacagttataaaaccccagatacccacgagataaatcgtatagcaagagagataagtaagggaatcaactcagatcgattaatactaattcatggagctgggtccttcggacacccattagtcaagaaatttaaattaaataaaaaatcaacaaacaaggatttattttctattctaaaggtacaagattcagttagggaattaaataggttatttaaggactctttaaataaagaaaaaataccagcttacacgattcatccttcatcaattacaagaacggaaaatggagagataatagatctagaattaaatacaataagacaagcactcaaggagggctatatacctctcctgtatggtgacatggttttagataccaaaaatagagcaagtgtattatctggtgatcgattagtttccttcttagctcaggaacttaaaccaaataaagttggtatggctacaactactcccgtattagataaaaacaatcaaaagatcgatttaatcacccaaaccgatttagaaaatataggagaatctaattcaactgatgtcacgggaggaatgttaaacaaagtaaatgagcttttaaaaacccgagccaaatcatatatcttcaatgctaaaaaaagaaaagcacttgaaaaattcataaaaggcaaaaacattgggacagaggtcgaatatgacgataaaggaaagaaaacttga

SEQ ID NO: 188 - DNA, 769 bp, Artificial sequence
  Codon optimised sequence
atgaagatcatcaagatcggcggcagtctgattaccgataaagatagctataaaacacctgatacccatgaaattaaccgcattgcacgtgaaattagtaaaggtattaacagcgatcgcctgattctgattcatggcgcaggtagcttcggccatccgctggttaaaaaattcaaactgaataaaaagagcaccaacaaagacttattcagcattctgaaagttcaggatagcgttcgcgaactgaatcgcctgttcaaagatagcctgaataaagaaaaaatcccggcatataccattcatccgagcagtattacccgtaccgaaaatggtgaaattattgatctggaactgaataccattcgccaggccctgaaagaaggttatattccgctgctgtatggcgatatggtgctggataccaaaaatcgcgcaagtgttctgagtggtgatcgtctggtgagcttcctggcacaggaactgaaaccgaataaagttggcatggcaaccaccaccccggtgctggataaaaataatcagaaaattgacctgatcacccagaccgatctggaaaatattggcgaaagcaatagcaccgatgttaccggtggcatgctgaataaagttaatgaactgctgaaaaccagagcaaaaagctatatcttcaatgcaaaaaagcgcaaagcactggaaaaattcattaaaggtaagaatatcggcaccgaagttgaatatgatgataaaggtaaaaagacctgactgaaagctt

SEQ ID NO: 189 - protein, 243 aa, Acidiplasma cupricumulans
MIILKLGGSIITDKKTYRKFEEDRTRKIIAEISKIKDKFIIIHGGGSFGHIMAKEYNIPGRLNKRSLYYMSLIHYDMSDLNMRVSKILSEYGMGNIPVPPSTYIYGKKKNYDIFRYYVKNNIMPVSYGDVYIKNRNYIGIYSGDDIIYDLSRIFMPEKVIFFSDVDGIFDKNPKIHKDAKLLKTVNKDFNFENDSIDVTGGIINKYNSMVKISKLGIKVYLINGLYPERIKDIGKDNFYGTVV

SEQ ID NO: 190 - DNA, 732 bp, Acidiplasma cupricumulans
atgataatattaaagcttggtggcagtataattacagacaaaaaaacatacagaaaatttgaggaggataggacaagaaaaattattgctgaaatatcgaaaattaaagataaatttattattatacatggaggcggatcttttggccacataatggccaaggaatataacataccgggcaggcttaataaaaggtcattatattacatgagccttatacattatgatatgtcagatctcaatatgagggtttcaaaaattctttcagagtacggcatgggaaatataccggtgccaccatcaacatatatttatggcaaaaaaaagaattatgacatctttaggtattatgtaaaaaataatattatgcctgtgagttatggagatgtttacataaaaaatagaaattacattggcatatattctggagatgatataatttatgatctatcaagaatattcatgccggaaaaggttatattttttagtgatgttgatggtatatttgataaaaatccaaaaatacataaggatgcaaaactgctaaaaacagtgaataaagattttaattttgaaaatgattcaatagatgttactggtggaattattaataagtacaattcaatggttaaaatttcaaaacttggcataaaagtttatttaataaatggattatatccagagagaataaaagatataggaaaagataatttttatggaacggtggtataa

SEQ ID NO: 191 - DNA, 742 bp, Artificial sequence
  Codon optimised sequence
atgatcatcctgaaactgggtggtagtattattaccgataaaaaaacctaccgtaagttcgaagaagatcgtacccgtaaaattattgccgaaattagtaaaatcaaggacaaattcatcatcatccatggtggcggcagcttcggccatattatggcaaaagaatataatatcccgggccgcctgaataaacgcagtctgtattatatgagcctgattcattatgatatgagcgatctgaatatgcgtgtgagcaaaattctgagtgaatatggtatgggtaatattccggttccgccgagtacctatatctatggtaaaaaaaaaaactacgacatcttccgttactatgttaaaaataacatcatgccggttagttatggcgatgtgtatattaaaaaccgcaattatatcggcatctatagtggtgatgatattatctatgacctgagtcgtatcttcatgccggaaaaagtgatcttcttcagcgatgttgatggtatcttcgataaaaatccgaaaattcataaggacgccaaactgctgaaaaccgttaataaagacttcaacttcgaaaatgacagcattgatgtgaccggcggtattattaataaatataatagcatggtgaagatcagcaaactgggcattaaagtgtatctgattaatggtctgtacccggaacgtattaaagatattggcaaagataacttctacggtaccgtggtgtgactgaaagctt

SEQ ID NO: 192 - protein, 244 aa, Aciduliprofundum species
MLLVKMGGSVITDKRVYRRFREDVMERIVKYLPKEDLIIVHGGGSFGHPLAKKYGITEGFSEEKTMGFAEIGRDMEDLNLRIIEILIENDIPAVSIAPHSFHIFGEEMDLHIFERFLSLGLVPVTYGDIILDSSQGINICSGDYLMLQLAREFRPEKVIFLTDVDGIYDRDPSEQGAELIEVLRRDSKVETIIKVDDVTGGVAYKISIMRKIARYSRVYVLNGFHPERIENVLNDEDFVGTVVE

SEQ ID NO: 193 - DNA, 735 bp, Aciduliprofundum species
atgctcctggtgaagatggggggaagcgtgataacagataagagggtttacagaaggttccgggaagatgtgatggagaggatagtcaaatatcttccaaaggaggatttgataattgtgcatggtggaggttcctttggtcatcctctggcaaagaaatacgggataacggagggattctcagaggaaaagaccatgggatttgcagagataggaagggatatggaggatcttaatctgaggatcatagaaattttgatagagaatgacattcctgccgtatccattgcgccccattccttccatattttcggagaggaaatggatctccacatatttgagagattcctctctctgggtttggtgcccgttacctacggggatataatccttgattcttcgcagggtataaacatatgctctggagattacctgatgcttcaacttgccagagaattcaggcccgagaaggttatattcctcacagatgtggacggcatatacgatagggatccctcagaacagggagcagaactcatagaggtgctgaggagggatagcaaggtagagacgatcataaaggtggatgatgttactggaggggttgcctacaaaatatccatcatgaggaaaattgcgaggtacagcagggtatatgtgcttaatggatttcatcccgagaggatagagaatgttttaaatgatgaagattttgtagggacggtggtggaatga

SEQ ID NO: 194 - DNA, 745 bp, Artificial sequence
  Codon optimised sequence
atgctgctggttaaaatgggcggtagcgttattaccgataaacgcgtgtatcgtcgcttccgcgaagatgttatggaacgtattgttaaatacctgccgaaagaagacttaattattgttcatggtggcggtagcttcggccatccgctggcaaaaaaatatggtattaccgaaggcttcagcgaagaaaaaaccatgggcttcgcagaaattggccgtgatatggaagacttaaatctgcgtattattgaaatcctgatcgaaaatgatatcccggcagtgagtattgccccgcatagcttccatatcttcggcgaagaaatggatctgcatatcttcgaacgcttcctgagcctgggcctggttccggttacctatggtgatattattctggatagtagccagggtattaatatctgtagcggcgattatctgatgctgcaactggcccgtgagttccgcccggaaaaagtgatcttcctgaccgatgtggatggcatctatgatcgcgatccgagtgaacagggcgccgaactgattgaagttctgcgtcgtgatagcaaagttgaaaccattattaaagtggatgacgttaccggtggtgtggcatataaaattagcattatgcgcaaaatcgcccgttatagccgtgtgtatgttctgaatggcttccatccggaacgtattgaaaatgttctgaatgatgaagacttcgtgggtaccgttgttgaatgactgaaagctt

SEQ ID NO: 195 - protein, 268 aa, Euryarchaeota archaeon
MGSEMGLRVAIKLGGGLITDKGSMKKFDQKAVEKVVDSLSSVSELGASIVLVHGAGSFGHLLAKKWGIANGFNIQLEKEQLEAVREIRSDMRELNALIIGKMEERGLECIGYPPSDWARGTGALFTGDVSIFERGSRQPIPVTFGDVVDTEDESRFGILSGDDLMLRLSTELEVTHSIFLIGDSEGVLTGPPAERDSELITHLGSETKIKGEHDAEIDVTGGIGLKIERALEIAKVVDEVWIIDGREPDRVLELLTSGETTGTKILNG

SEQ ID NO: 196 - DNA, 807 bp, Euryarchaeota archaeon
ttggggtcggaaatgggactcagggtagcaataaaattaggagggggcctaattactgacaagggttctatgaagaaattcgaccaaaaggccgttgaaaaggttgtggactcgctaagttctgtttctgaattgggggcttcaatcgtgctggttcacggagctggctcttttggacatctgctggcaaagaaatgggggattgctaatggattcaatattcaactggagaaggagcagttggaagcagtaagagaaattcgttcagatatgagggaattaaatgccctgatcataggaaagatggaagaaagaggtttggaatgcattggctatcccccctctgattgggccaggggcactggagcactttttactggggatgtttcaatattcgaaaggggtagtagacagccaattcctgtaacatttggtgatgttgttgatactgaggacgagtctaggtttggtatattgtcaggagacgatttgatgctacgtttgtctactgaattagaagtcacgcatagcatttttctcattggggattctgagggagttttgactggccctccagcagaaagagattctgaattgattacgcatttaggatctgaaaccaaaattaagggggagcatgatgcagaaatcgatgttactggggggattggattgaaaatagaaagggctctcgagattgcaaaggtagtggatgaagtgtggataattgacggtagagaaccagatagagttcttgaattattgacatccggggaaactacagggactaagattctgaacggttga

SEQ ID NO: 197 - DNA, 817 bp, Artificial sequence
  Codon optimised sequence
atgggcagtgaaatgggcctgcgtgttgccattaaactgggtggcggcctgattaccgataaaggcagtatgaaaaaattcgatcagaaagccgttgaaaaagttgtggatagcctgagcagcgttagcgaactgggtgcaagcattgttctggtgcatggtgcaggcagcttcggccatctgctggcaaaaaaatggggtattgcaaatggcttcaatattcagctggaaaaagaacagctggaagccgtgcgcgaaattcgcagcgatatgcgcgaactgaatgccctgattattggtaaaatggaagaacgcggtctggaatgcattggttatccgccgagcgattgggcccgtggtaccggtgcactgttcaccggtgatgtgagcatcttcgaacgtggcagccgtcagccgattccggtgaccttcggtgatgttgtggataccgaagatgaaagccgcttcggcattctgagcggtgatgatctgatgctgcgtctgagtaccgaactggaagtgacccatagcatcttcctgattggcgatagcgaaggtgttctgaccggcccgccggcagaacgtgatagcgaactgattacccatctgggcagtgaaaccaaaattaaaggcgaacatgatgccgaaattgatgtgaccggtggcattggtctgaaaattgaacgtgcactggaaattgcaaaagttgttgatgaagtgtggattattgatggtcgtgaaccggatcgcgtgctggaactgctgaccagcggcgaaaccaccggtaccaaaattctgaatggctgactgaaagctt

SEQ ID NO: 198 - protein, 260 aa, Nitrososphaera evergladensis
MQKLALVKLGGSVITFKDKALTANTGAIDGISGALVQLDMPVIVVHGGGSFGHHWSVQYDMHTKPAPYDPHGVAVVHESMIALNQIIVNSMIKAGANPYAVAPCMFTTGHKAIAAKVRQLYEMAKANNVIPVTFGDVVHMGGRKYSILSGDALMSIIAKVLKPSRVIFATNVDGIYRDMKTRELVQELKSARRNGDPVEFSKTAGADVTGGMQRKVREAFKIASMGMDVVLVNGLYPERIVQAAHGEVQTGTVVVKKGRK

SEQ ID NO: 199 - DNA, 783 bp, Nitrososphaera evergladensis
atgcagaaacttgcacttgtcaagctgggaggctctgtcatcaccttcaaggacaaggcacttacagcaaacactggcgcaatagatggcatatccggcgcacttgtacagcttgacatgcctgtcattgttgtccacggcggggggtcttttggccaccactggtctgtgcagtacgacatgcacaccaagcctgcgccctacgacccgcacggagtggccgtggtgcacgaatcgatgattgcgttaaaccagataatcgtaaattccatgataaaggcaggcgcaaacccgtacgccgttgcaccctgcatgttcacgacgggccataaagcgattgcagcaaaggtaaggcagctgtacgaaatggccaaggcaaacaacgtaatccctgtcacgtttggcgacgtggtccacatgggcggccggaaatactctattctttccggcgacgcgctgatgtccatcatcgcaaaggtgctaaagccgtcaagggtcatatttgccaccaacgtcgacggcatttaccgggacatgaagacgagggaactcgtacaggagctaaagtcggcaaggcggaatggtgatcccgtggagttctcaaagacggccggcgccgacgtgacgggcggcatgcagcgcaaggtaagggaagcatttaagattgcatctatgggtatggatgtcgtgctggtaaatgggctttatcctgagcgcatagtccaggcggcgcacggcgaggttcaaacaggcaccgtagtagtaaagaaggggaggaaataa

SEQ ID NO: 200 - DNA, 793 bp, Artificial sequence
  Codon optimised sequence
atgcagaaactggccctggtgaaactgggtggtagcgttattaccttcaaagataaagccctgaccgccaataccggtgcaattgatggtattagcggtgcactggtgcagctggatatgccggttattgtggtgcatggtggtggcagcttcggtcatcattggagcgtgcagtatgatatgcataccaaaccggccccgtatgatccgcatggtgtggccgttgtgcatgaaagcatgattgcactgaatcagattattgtgaatagcatgattaaggcaggtgccaatccgtatgcagttgccccgtgtatgttcaccaccggtcataaagccattgcagccaaagttcgccagctgtatgaaatggccaaagcaaataatgttatcccggttaccttcggcgatgtggtgcacatgggtggtcgtaaatatagcattctgagtggtgatgcactgatgagcattattgcaaaagtgctgaaaccgagtcgcgttatcttcgcaaccaatgttgatggtatctatcgcgatatgaaaaccagagaactggttcaggaactgaaaagcgcccgtcgtaatggtgatccggtggagttcagtaaaaccgccggtgccgatgttaccggcggcatgcagcgcaaagtgcgcgaagccttcaaaattgccagcatgggtatggatgtggtgctggtgaatggtctgtatccggaacgcattgtgcaggccgcccatggtgaagttcagaccggtaccgtggtggtgaaaaaaggtcgtaaatgactgaaagctt

SEQ ID NO: 201 - protein, 256 aa, Methanosalsum zhilinae
MSQHKNITILKIGGSVITDKSSDIGKVQIEEIERICQEISGYSNDLIIVHGAGSYGHPLAKKYDLDNIPDPKGAIITHSSVKSLNEIMVSSLQKAGIDAVSVHPLNNTVSNDGRISDMFLSNIHIMLENGLVPVIHGDVVMDITNTFSVISGDQIVSYLANKLKASRVGIGSIEDGVMDNKGKTLTKITSSNFKEIEKFLGVSKNTDVTGGMLGKVNELLQLCEITGATSYIFNAKKPNNISYFLSGHNIGTAIKK

SEQ ID NO: 202 - DNA, 771 bp, Methanosalsum zhilinae
atgagtcaacataaaaacattacaattctgaaaataggtggaagtgtaattactgataagagttctgatattgggaaggttcaaatcgaagaaatcgaacgtatatgtcaggaaatatctggatatagcaatgatcttataattgtccatggtgccggctcctatggtcacccccttgcaaaaaaatatgatctggacaatattccagacccaaaaggtgcaattataacacatagttctgtaaaatcgttaaatgagattatggtaagctcacttcaaaaagctggaatcgatgcagtttctgtccatccgttaaataacacagtctcaaatgatggacgaatttctgacatgtttttatccaatatccatatcatgctggagaacggtttagtcccggtgatacatggtgatgtggtaatggacataacaaatactttttctgttatttccggggatcaaattgtttcgtatcttgcaaataaactgaaagcttcccgggttggaattggaagtattgaagatggggttatggacaataaaggaaaaactcttaccaaaatcaccagttccaattttaaagaaatagaaaaatttctaggcgtatccaaaaatactgatgtcaccggtggtatgcttggaaaagttaatgaactacttcagctttgtgaaataaccggtgccacttcctacattttcaatgcgaaaaaaccaaataacatttcgtattttttaagtggacataacataggaactgcaataaaaaaatag

SEQ ID NO: 203 - DNA, 781 bp, Artificial sequence
  Codon optimised sequence
atgagccagcataaaaatatcaccattctgaaaatcggcggcagcgttattaccgataaaagcagcgatattggtaaagttcagattgaagaaatcgaacgcatctgtcaggaaattagtggctatagtaatgatctgattatcgttcatggcgccggtagttatggccatccgctggccaaaaaatatgatctggataatattccggacccgaaaggtgcaattattacccatagcagtgtgaaaagcctgaatgaaattatggttagtagcctgcaaaaagcaggcattgatgcagttagtgtgcatccgctgaataataccgtgagtaatgatggtcgcattagtgatatgttcctgagtaatattcacattatgctggaaaatggcctggtgccggttattcatggcgatgttgtgatggatattaccaataccttcagcgtgattagcggtgatcagattgtgagctatctggcaaataaactgaaagcaagtcgtgttggcattggcagtattgaagatggcgtgatggataataaaggcaaaaccttaaccaaaatcaccagtagcaacttcaaagaaattgaaaaattcctgggtgttagcaaaaataccgatgtgaccggcggtatgctgggcaaagttaatgaactgctgcaactgtgtgaaattaccggtgccaccagctatatcttcaatgccaaaaaaccgaataacattagttacttcctgagtggtcataatattggtaccgccattaaaaaatgactgaaagctt

SEQ ID NO: 204 - protein, 260 aa, Euryarchaeota archaeon
MLLVKFGGSVITVKSKYRTLRGADLSRLARELAAAHDPEAGTVLVHGAGSYGHILAAKHRLKEGFRDDAQLTAVAQVQRDVRALDLKVLDALLRARLRPIAIPPGTDAVVDKDGRFHLDTAPFEDYRMRGFLPVSFGDVVRDEGRLFTIASGDDVVLELARFYRPERVLFVADVDGVFTADPKRDRAATLLDVVDGPALERIAFSDAAGRDVTGGLRAKLERMREIAGVAKDVRIINGLAKGRLERAAKGGDVPGTRVVA

SEQ ID NO: 205 - DNA, 783 bp, Euryarchaeota archaeon
atgcttctcgtgaagttcggcggctccgtgatcacggtgaagtcgaagtaccgcaccctgcggggggcggacctctcccgcctcgcgcgggagctcgcggcggcccacgacccggaggcgggaacggtcctcgtccacggcgcgggctcgtacggccacatcctcgcggcgaagcaccgcctgaaggagggcttccgcgacgacgcccagctcaccgcggtcgcgcaggtccagcgggacgtgcgggccctcgacctcaaggtcctcgacgcgctcttgcgggcccgcctccgcccgatcgcgatccccccgggcacggacgcggtcgtcgacaaggacggccgcttccacctcgacaccgcgcccttcgaggactaccggatgcgggggttcctccccgtctccttcggggacgtcgtgcgggacgaggggcggctcttcacgatcgcctccggggacgacgtcgtcctcgagctcgcgaggttctaccgcccggagcgggtcctcttcgtcgcggacgtggacggcgtgttcacggcggacccgaagcgggaccgggccgcgaccctcctcgacgtcgtcgacggtcccgccctcgagcggatcgcgttctcggacgcggcggggagggacgtgacgggggggctgcgcgccaagctcgagaggatgcgggagatcgcgggggtcgcgaaggacgtgcggatcatcaacggcctcgcgaagggccgcctcgagagggcggcgaagggcggggacgtgccgggcacgcgggtggtggcgtag

SEQ ID NO: 206 - DNA, 793 bp, Artificial sequence
  Codon optimised sequence
atgctgctggtgaaattcggtggtagtgttattaccgtgaaaagcaaatatcgtaccctgcgtggcgccgatctgagccgcctggcacgtgaactggcagcagcccatgatccggaagcaggtaccgttctggttcatggtgcaggtagctatggtcatattctggcagcaaaacatcgtctgaaagaaggcttccgtgatgatgcacagctgaccgcagtggcccaggttcagcgtgatgtgcgcgccctggatctgaaagtgctggatgccctgctgcgtgcccgtctgcgtccgattgccattccgccgggtaccgatgcagtggttgataaagatggtcgcttccatctggataccgccccgttcgaagattatcgtatgcgtggcttcctgccggttagcttcggcgatgttgtgcgtgatgaaggtcgcctgttcaccattgccagcggcgatgatgttgtgctggaactggcacgcttctatcgtccggaacgcgtgctgttcgttgcagatgttgatggcgtgttcaccgcagatccgaaacgtgatcgtgccgcaaccctgctggatgtggttgatggtccggccctggaacgtattgccttcagtgatgcagcaggccgcgatgttaccggcggtctgcgtgccaaactggaacgcatgcgtgaaattgccggtgtggccaaagatgtgcgtattattaatggcctggcaaaaggccgtctggaacgtgcagccaaaggcggtgatgtgccgggcacccgcgtggttgcatgactgaaagctt

SEQ ID NO: 207 - protein, 264 aa, Archaeoglobus sulfaticallidus
MRDDEIIILKIGGSIITDKSKGSFEKAKFDVIERISREISQFLMENRKKIILVHGAGSFGHPHVEKYNLKEKKELRGVLTTHFACKRLNSIVCDKLLENGVHALGIHPLTSFFLDEKLNINIDLFLDMLTEDIIPVTHGDMIYNRKRKFFEVLSGDSIISALMGELSDRKLRVGLATDVDGVIYDGRVVKEINADNFEEVLSAIDKSAMDAERKSDVTGGMKGKIGALFRSIHGSEVRIFNGAIEGNIIKFLKGEALGTLIRGK

SEQ ID NO: 208 - DNA, 795 bp, Archaeoglobus sulfaticallidus
ttgagggatgatgagataattatactcaagatcggtggatcgatcataacggataaatcaaaggggagcttcgagaaagcaaaattcgatgtgatagagaggatttccagggaaatcagccagtttttgatggagaacaggaaaaagattatactggtccatggagcaggttctttcgggcatccgcatgtcgagaaatacaacctgaaagagaagaaagagttgagaggagttttaacaactcattttgcctgcaagagactgaactcgattgtatgcgataaacttttagagaatggagttcatgctctgggaatccatcccttaacgagctttttcttggatgaaaagctgaacatcaacatcgatctctttctggatatgctgacagaggacataattcctgttactcatggcgacatgatctacaacagaaagcgaaagttcttcgaggttctttcaggagattcaataatctccgccttgatgggagagctttctgacagaaagctgagagttggattagcaactgatgtcgatggagtgatttatgatggcagggttgttaaggaaatcaacgcagataactttgaagaggttttatccgcaatagacaaatctgcaatggatgcagagagaaaatcggatgttaccggtggaatgaagggaaagatcggagccctgttcagatccattcatggttctgaggtgaggatattcaatggagcgattgagggaaacattattaagtttctgaaaggtgaggcattaggcacacttatcagggggaaatga

SEQ ID NO: 209 - DNA, 805 bp, Artificial sequence
  Codon optimised sequence
atgcgtgatgatgaaattatcatcctgaaaattggtggtagtattattaccgataagagcaaaggcagcttcgaaaaagccaaattcgatgtgattgaacgtattagccgcgaaattagtcagttcctgatggaaaatcgcaaaaaaattatcctggttcatggtgcaggtagcttcggccatccgcatgttgaaaaatataatctgaaagaaaagaaggagctgcgtggcgttctgaccacccacttcgcctgtaaacgcctgaatagcattgtgtgtgataaactgctggaaaatggtgttcatgccctgggcattcatccgctgaccagcttcttcctggatgaaaaactgaatattaacatcgatctgttcctggatatgctgaccgaagatattattccggtgacccatggtgatatgatctataatcgcaaacgtaaattcttcgaagtgctgagcggtgatagcattattagcgcactgatgggtgaactgagcgatcgtaaactgcgcgtgggcctggcaaccgatgtggatggtgtgatctatgatggtcgcgtggtgaaagaaattaatgcagataacttcgaagaggttctgagtgccattgataaaagcgccatggatgcagaacgtaaaagtgatgtgaccggtggcatgaaaggtaaaattggcgccctgttccgtagtattcatggcagtgaagttcgcatcttcaatggtgccattgaaggcaatattattaaattcctgaagggtgaagccctgggtaccctgattcgcggcaaatgactgaaagctt

SEQ ID NO: 210 - protein, 242 aa, Thermoplasmatales archaeon
MDIIKIGGSLLTDKTVYRKFYQKKTSTIIQRLSRLESFILVHGGGSFGHYISEKYGLPGEVSEERIKAAAIVKYDMADLNQRIVKMLNNMGRPAIGISPFFLDRNNSFNYDLVKKVLEMNFIPVLYGDVYLRNHEIGILSGDHIMVSLAEMFKPERAIFLSDVDGVFDMDPKKYRNAAMIRKYSKEIVNFGAISNDVTGGMELKFRSMINCKKAGVKTYLLNGNFPERIENIDKEDFVGTEF

SEQ ID NO: 211 - DNA, 729 bp, Thermoplasmatales archaeon
atggatataatcaagatcggtggtagcctgcttacagacaagacagtatacaggaagttttaccagaaaaaaacatcaaccatcatccagagactctcaagattggaaagtttcatacttgttcatgggggaggttccttcggtcattacatcagtgaaaaatacggtttgccgggggaggtatcagaggagagaataaaggctgcagccatagtcaaatatgatatggctgatctgaaccagaggatagtgaaaatgcttaacaacatgggaagacctgcaattggcatctcaccatttttccttgatagaaataactcattcaattacgatctggtgaagaaggtactggaaatgaatttcattcctgtactttatggggatgtgtatttaaggaatcatgaaattggaatcctgtcaggagatcatattatggtttcacttgctgaaatgttcaaacctgagagggcaatcttcctcagtgatgttgatggtgtttttgacatggatccaaagaaatacagaaatgcagcaatgatcaggaagtattcaaaggaaatagtgaattttggtgccatatccaatgatgttactggtggcatggaactcaagttcagatcaatgataaactgcaaaaaagcaggtgttaaaacatatttactcaacgggaattttccagaaagaattgaaaatatagataaagaagattttgtggggactgaattttaa

SEQ ID NO: 212 - DNA, 739 bp, Artificial sequence
  Codon optimised sequence
atggatatcatcaagatcggtggtagtctgctgaccgataaaaccgtgtatcgcaaattctatcagaaaaaaaccagcaccattattcagcgcctgagtcgcctggaatcattcattctggttcatggcggcggtagcttcggccattatattagtgaaaaatatggtctgccgggtgaagtgagcgaagaacgtattaaagcagcagccattgttaaatatgatatggcagacttaaaccagcgtattgttaaaatgctgaataatatgggccgcccggccattggcattagcccgttcttcctggatcgcaataatagcttcaattatgatctggttaagaaggttctggaaatgaacttcattccggttctgtatggcgatgtgtatctgcgtaatcatgaaattggcattctgagcggtgatcatattatggtgagcctggcagaaatgttcaaaccggaacgcgcaatcttcctgagcgatgttgatggcgtgttcgatatggaccctaaaaaatatcgtaatgcagcaatgattcgtaaatatagcaaagaaatcgtgaacttcggtgcaattagcaatgatgtgaccggcggcatggaactgaaattccgcagtatgattaattgcaaaaaggccggtgttaaaacctatctgctgaatggtaacttcccggaacgtattgaaaatattgataaagaagacttcgtgggtaccgagttctgactgaaagctt

SEQ ID NO: 213 - protein, 264 aa, Thermoplasmatales archaeon
MRKRVLVEGLIFYIHVTIRPMMQLVKLGGSVITVKSRYRYFLQQTTRKIVHELKKIDDEIILVHGGGSFGHIKASEYQLSGSPASSSRSGISIVHRDMMELDQRIIGVMLSESMPGIGMAPSSFPDPFIPPFELIESYMKAGLFPVTFGDVYIRNGNSGIVSGDDLMLALALHFKPTRVMFLSDVDGIFDRNPKTHPDAELRKEVKGNEAFELNREDVTGGMGKKLGIMKKIAETGTTVYLLNGRHPERIWNMGTRDFIGTVIH

SEQ ID NO: 214 - DNA, 795 bp, Thermoplasmatales archaeon
atgaggaagagagtcttggttgagggtcttatattttatatccatgtaacaattcgcccaatgatgcagctggtaaaactcggagggagcgtcataaccgtcaaatcaagatatcgttattttctccagcagacaacaagaaaaattgtgcacgaacttaaaaaaattgatgacgaaataattcttgttcacgggggcggatcattcggtcacataaaggccagcgaataccagttgagcggaagcccggcatcctcatcacgtagtggaatttcaatagtgcacagggatatgatggaacttgatcagaggattattggtgtgatgctatccgaaagcatgccaggcattggaatggccccctcatcttttccggaccctttcattccccccttcgagctgattgaatcctacatgaaggcagggctgtttccggtgacctttggtgatgtatatatccggaatgggaattcaggtattgtatccggtgacgacctgatgctcgcccttgcgcttcatttcaagccaacaagagtgatgttcctgagcgatgttgacggaatattcgacagaaatccaaagactcacccagatgccgaactcaggaaagaggtgaagggaaatgaggcgtttgagctgaacagagaggacgtgacaggcggaatgggtaaaaaattgggaataatgaagaagatagcagaaactggaacaactgtatacctcctcaacgggaggcatccggagaggatctggaatatggggacgcgggatttcatcggtacggtgatacattga

SEQ ID NO: 215 - DNA, 805 bp, Artificial sequence
  Codon optimised sequence
atgcgcaaacgcgtgctggtggaaggtctgatcttctatattcatgttaccattcgtccgatgatgcagctggttaaactgggcggtagtgttattaccgtgaaaagtcgttatcgttacttcctgcaacagaccacccgcaaaattgtgcatgaactgaaaaaaattgacgatgaaatcatcctggttcatggcggtggtagcttcggccatattaaagccagcgaatatcagctgagcggcagcccggccagcagctcacgtagtggcattagcattgtgcatcgcgatatgatggaactggatcagcgtattattggtgtgatgctgagcgaaagtatgccgggtattggcatggccccgagcagcttcccggacccgttcattccgccgttcgaactgattgaaagctatatgaaagcaggtctgttcccggttaccttcggcgatgtgtatattcgtaatggtaatagcggtattgtgagcggcgatgatctgatgctggccctggcactgcacttcaaaccgacccgcgtgatgttcctgagtgatgttgatggtatcttcgatcgtaatccgaaaacacatccggatgcagaactgcgcaaagaagttaaaggtaatgaagccttcgaactgaatcgcgaagatgtgaccggtggcatgggtaaaaaactgggcattatgaaaaaaatcgccgaaaccggcaccaccgtgtatctgctgaatggccgtcatccggaacgtatctggaatatgggcacccgcgacttcattggcaccgttattcattgactgaaagctt

SEQ ID NO: 216 - protein, 259 aa, Archaeoglobales archaeon
MDTLIIKLGGSAITNKERRYEVRRKVVERIAKEVKILIKNYKLVLVHGGGSFGHPTAKEYNIHLGYFSNHQLIGYSKVRYFMTQLNQIILEYFIKSGVPAVTLHTSNILKANDGKISSFNIGLLIEYTKMGFTPVVYGDAVLDEKRGFSIISGDQIVSYLAIRLKPIKVILGTDVDGIYTGNPKKDSNAKLVKTLKISKLITIKADKPMIDVTGGIVAKIDEMRKVVKAGIPVIIGNIVSGNLIDLVEEKTPKYTKIIM

SEQ ID NO: 217 - DNA, 780 bp, Archaeoglobales archaeon
atggatacgttaataattaagcttggcggatcggctataacaaataaagaaagaagatacgaagttagacgtaaggtcgttgaaagaatagcaaaggaagttaaaatccttatcaaaaactacaaattagtattggtgcatggaggagggagtttcggtcacccaacggctaaagaatacaacatacacctaggatatttttctaatcatcagcttattggctatagcaaggtaagatatttcatgacgcagcttaatcagataattctagaatattttataaaatctggagttcctgcagttacattgcatacttcgaatatacttaaggcaaatgatggaaaaatatcaagttttaacatagggcttttaatagagtatacgaagatgggatttacgccggtagtttatggagacgctgttttagacgaaaaaagaggattcagcataatttctggagatcagatagtttcttatctagctataagattgaagccaattaaggtcattttaggaacagatgtggatggcatatacacgggtaatcccaaaaaagattcaaatgcaaaactcgtcaaaacattaaaaatatccaagcttataactataaaagctgataagccaatgatcgatgtaactggtggaatagtagcaaaaatagatgaaatgagaaaagttgtaaaagctggaataccggttataatcgggaacatcgtttcaggaaacttgattgatcttgttgaagagaaaacacctaaatatacgaaaatcataatgtaa

SEQ ID NO: 218 - DNA, 790 bp, Artificial sequence
  Codon optimised sequence
atggataccctgattattaagctgggcggtagcgcaattaccaataaagaacgtcgttatgaagttcgtcgcaaagttgttgaacgcattgcaaaagaagtgaaaattctgattaagaactacaagctggtgctggttcatggcggtggtagcttcggccatccgaccgcaaaagaatataatattcatctgggctacttcagcaatcatcagctgattggctatagtaaagttcgctacttcatgacccagctgaatcagattattctggaatacttcattaagagcggtgtgccggcagtgaccctgcataccagcaatattctgaaagccaatgatggtaaaatcagtagcttcaatatcggcctgctgattgaatataccaaaatgggcttcaccccggttgtgtatggcgatgccgttctggatgaaaaacgcggcttcagcattattagtggcgatcagattgtgagctatctggccattcgtctgaaaccgattaaagttattctgggcaccgatgttgatggtatctataccggtaatccgaaaaaagatagtaatgcaaaactggttaagaccctgaaaattagcaaactgattaccattaaggccgataaaccgatgattgatgtgaccggtggcattgtggccaaaattgatgaaatgcgtaaagtggttaaggccggtattccggtgattattggtaatattgtgagtggtaatctgattgatctggtggaagaaaaaacacctaaatataccaaaatcatcatgtgactgaaagctt

SEQ ID NO: 219 - protein, 238 aa, Pyrobaculum species
MFIVKFGGSAITDKTKPYTFLRGRIAQAAPALRGRRAVLIHGAGSFAHPHVKAFGLTPTGIALTKATLRRLTALVAEELLEAGLPAMPVEPSDVFWGRSLVRREVITHALERGLYPLLHGDIVPSDEGYVVVSGDDIAVELARLYKPSAVIFLMNVDGIYTASPGSPNAEKIRRLKSNVYLEGTAGVDVTGGIRKKVEAGLAIAALGTPVFYCSISDRESLEIIARGGAPENCTSVEP

SEQ ID NO: 220 - DNA, 717 bp, Pyrobaculum species
atgtttatcgtgaaattcggcggctccgccatcaccgacaagacgaagccctacaccttcctccgggggcggatcgcgcaagccgcgccggcgctccgcgggaggagggccgtcttaatccacggcgcgggctccttcgcacacccccacgtcaaggccttcggactgacgccaaccggcatagccctgaccaaggccacgttgaggcgcctcacagccctagtggccgaggagctactagaggctggcctgccggccatgccggtggaacccagcgacgtgttctggggcagatcgctggtccggcgtgaggtcatcacacatgcgctggagagggggctgtaccccctcctccacggcgacatagtcccctccgacgagggctacgtggtggtcagcggcgacgacatcgcggttgagctcgccaggctctacaagcccagcgccgtgatcttcctcatgaacgtagacggcatctacacggcgtctcccggaagccccaacgccgaaaaaataagaaggctaaaaagtaacgtatatttagaggggaccgccggtgtagacgtcacggggggtataaggaagaaggtggaggctggattggccatagcggctctgggaacccccgtgttctactgttcaatatctgacagagaatccctcgagataatcgcaagaggcggagccccagagaactgcacctctgtggagccctag

SEQ ID NO: 221 - DNA, 727 bp, Artificial sequence
  Codon optimised sequence
atgttcatcgttaagttcggtggcagtgcaattaccgataaaaccaaaccgtataccttcctgcgcggccgtattgcacaggccgcccctgcactgcgtggtcgtcgtgcagttctgattcatggcgcaggtagcttcgcccatccgcatgtgaaagcattcggcctgaccccgaccggtattgccctgaccaaagcaaccctgcgtcgcctgaccgccctggttgccgaagaactgctggaagccggcctgccggccatgcctgtggaacctagtgatgtgttctggggtcgcagcctggtgcgccgcgaagtgattacccatgccctggaacgcggcctgtatccgctgctgcatggtgatattgttccgagtgatgaaggctatgttgttgttagcggcgatgatattgcagtggaactggcacgtctgtataaaccgagtgcagtgatcttcctgatgaatgtggatggtatctataccgcaagtccgggtagcccgaatgccgaaaaaattcgtcgtctgaaaagtaatgtgtatctggaaggcaccgccggcgtggatgtgaccggcggtattcgtaaaaaagtggaagccggcttagcaattgcagcactgggtaccccggtgttctattgtagtattagcgatcgtgaaagcctggaaattattgcacgtggcggtgccccggaaaattgtaccagtgtggaaccgtgactgaaagctt

SEQ ID NO: 222 - protein, 249 aa, Methanosaeta species
MKVLKIGGSILTDKRRIGAARLGEIQRVADEIAVNPEDLVLVHGAGSFGHIPARRYGLPENFNPEGLRATHSSVVKLNDLVIDALCKAGVFAMPVHPFSCVLLRDGRIDSFALKPIEEMVRDGLLPVLHGDVAMDATRKAGIVSGDQIVTYVARALQAEVVAVGCNVDGVLFSGEPLRELTRKDLPSIEGALGGSAGVDVTGGMRGKLLEMLDLADAGIMSVIFNAGTEGNVLRALRGEPIGTMVRRPN

SEQ ID NO: 223 - DNA, 750 bp, Methanosaeta species
atgaaggttctgaagatcggcggaagtattctgacggacaagagaaggatcggcgccgctcgtctcggggagattcagcgcgttgccgacgagatcgccgtcaatcctgaggatctggtgctggtccacggcgcaggttcctttgggcacatccctgcaagaagatatggacttccagagaacttcaacccagagggactcagggcgactcatagctcagtggtcaagctcaacgaccttgtcatagacgctctatgcaaagccggcgtcttcgcgatgccagtccatccattctcctgcgttctcctaagagacggcaggatagacagctttgccttgaagcccatcgaggagatggtccgcgacggactgcttcctgttttgcatggcgatgtggccatggatgcgacgcgaaaggctggaatcgtctccggagatcagattgtgacgtacgttgccagggccctgcaggcggaggtcgtggctgtgggatgtaacgttgacggcgtgctattctccggagagccgctgagggagctgacccgcaaggatctgccttcgatcgagggggctcttggagggagcgctggggtcgatgtgaccggcggcatgcgtggaaaactgctggagatgctggatcttgccgatgccggaataatgtcagtgatcttcaatgcaggcactgaaggcaacgttctgcgggcactgcgtggcgagcccattggcacaatggtgcggaggccgaattga

SEQ ID NO: 224 - DNA, 760 bp, Artificial sequence
  Codon optimised sequence
atgaaggttctgaaaatcggcggcagtattctgaccgataaacgtcgtattggtgccgcccgcctgggtgaaattcagcgtgtggccgatgaaattgcagttaatccggaagacttagtgctggtgcatggtgcaggtagcttcggtcatattccggcacgccgttatggtctgccggaaaacttcaatccggaaggcctgcgcgccacccatagcagtgttgtgaaactgaatgatctggtgattgatgccctgtgtaaagcaggtgtgttcgccatgccggttcatccgttcagctgtgttctgctgcgtgatggccgtattgatagcttcgcactgaaaccgattgaagaaatggtgcgtgatggcctgctgccggttctgcatggtgatgttgcaatggatgcaacccgtaaagcaggtattgttagcggcgatcagattgttacctatgtggcacgcgcactgcaagcagaagtggtggcagtgggctgtaatgttgatggcgttctgttcagtggtgaaccgctgcgcgaactgacccgcaaagacttaccgagtattgaaggcgcactgggtggcagcgcaggtgtggatgttaccggtggtatgcgtggcaaactgctggaaatgctggatctggcagatgcaggtattatgagtgttatcttcaatgcaggtaccgaaggcaatgttctgcgtgccctgcgtggcgaaccgattggcaccatggtgcgtcgtccgaattgactgaaagctt

SEQ ID NO: 225 - protein, 261 aa, Methanococcus aeolicus
MLAILKLGGSILCDKNTPFSVKTDDLKRMSLEIKKAIEYYKNKGEILNLIIVHGGGSFGHPVAKKYIKTNENGEKVFFNMEKGFWDIQNAMRKFNNIVIEELHQQEVPAVSIQPSSFILFDEKGELHFDTYAIEGMLKRNLIPVIHGDIVLKGENNYKIFSGDHALPYLSKKLNPDLSLHASDVDGVYDLDKKTIKKINSDNINDVLKCLKPSNKQDITGGMYLKVMECYNLGIKTIIFNGSKKDNIYKSLIGEVNGTKIN

SEQ ID NO: 226 - DNA, 786 bp, Methanococcus aeolicus
atgttggccattttaaaacttggagggagcatattatgcgataaaaatactcctttttcagtaaaaacagatgatttaaaaagaatgtccttagagataaaaaaggcaattgaatattataaaaataaaggagagatattaaatttaataatcgttcatggcggcggttcatttggacatcctgttgcaaaaaaatacattaaaacaaatgaaaatggagaaaaagtattttttaacatggaaaaaggattttgggatattcaaaatgccatgcgaaaatttaataatattgttattgaggagctccatcaacaagaagtccctgctgtatcaattcaaccttcttcatttatattatttgatgagaagggggagctccactttgatacctatgcaatagaaggaatgttaaaaagaaatttaattcctgttatacacggcgatattgtgttgaagggagaaaataactataaaatattttccggggaccatgccctaccatatttatcaaaaaaattaaatcctgatttaagcctacatgcctccgatgtagatggcgtttatgatttggataaaaaaacaataaaaaaaattaattcagataatataaacgatgttttaaaatgtttaaaaccatcaaataaacaggacattacaggggggatgtatttaaaagtaatggaatgttataatttaggcataaaaaccataatatttaatggtagtaaaaaagataatatatataagtcattaattggagaggttaatggaactaaaattaattaa

SEQ ID NO: 227 - DNA, 796 bp, Artificial sequence
  Codon optimised sequence
atgctggccattctgaaactgggtggtagcattctgtgtgataaaaataccccgttcagcgttaaaaccgatgatctgaaacgcatgagtctggaaattaaaaaagcaattgagtactacaagaacaagggtgaaattctgaatctgattattgtgcatggcggcggcagcttcggtcatccggtggctaaaaaatatattaaaaccaatgagaacggtgagaaagtgttcttcaatatggaaaaaggcttctgggatattcagaatgcaatgcgtaaattcaataacattgtgattgaggaactgcatcagcaggaagttccggcagttagtattcagccgagtagcttcattctgttcgatgaaaaaggcgaactgcacttcgatacctatgccattgaaggcatgctgaaacgcaatctgattccggtgattcatggcgatattgttctgaaaggtgaaaataattacaagatattcagcggtgatcatgcactgccgtatctgagcaaaaaactgaatccggatctgagcctgcatgccagcgatgttgatggtgtgtatgatctggataaaaaaaccattaagaagatcaacagcgataatattaacgatgtgctgaaatgtctgaaaccgagtaataaacaggatattaccggtggcatgtatctgaaagttatggaatgctataacctgggcattaaaaccattatcttcaatggtagcaagaaagataacatctataagagcctgattggcgaagtgaatggtaccaaaattaattgactgaaagctt

SEQ ID NO: 228 - protein, 281 aa, Heimdallarchaeota archaeon
MNSDELCLIKLGGAAITDKTKDYTMRPEIISSVLNEISYSDKKAIIIHGAGSFAHNIAKEYKLVHGLDSAVARDLQYRGVSITRRSLLNLHTAVLDSALEANLLPFSFPVSAIFVSDGEQQLYSKYLDGVVEALDKGFTPILYGDISFDIKTHFRVISGDRILRVLVKHLKGLKHKDNSLYFNNIKVFFGSNVDGLYDKDPKNEDAKLIDYITNNQIAELIETAGESAGTDVTGGMKGKLMEIKQISDLGSEVQIMNIMEEDRMYHALVNEPDIRTVITPN

SEQ ID NO: 229 - DNA, 846 bp, Heimdallarchaeota archaeon
atgaatagcgacgaattgtgtctgatcaaacttggtggtgcagctatcaccgataaaaccaaggattacaccatgagaccagaaattatttctagtgtcttaaacgaaattagttatagtgacaaaaaagcgatcattatccatggagcagggtcatttgctcataatatagcaaaagaatataagctagttcacggacttgattccgcagttgctcgagatttacaatatagaggcgttagcattacgcgtagatcattattgaatttacataccgctgttttggactctgctttggaggctaatcttctcccattctcttttcctgtgtcagcaatttttgtttcagacggagaacaacaattgtattcgaaatatttggatggagtagttgaagcactggataaaggttttacacccattctttatggggatatttcatttgacattaaaactcatttcagagtgatttctggtgatcgaatcctccgagtcttggttaaacatctaaaagggttaaaacataaagataatagcttgtatttcaataatattaaagtattttttggatctaatgttgatggattatatgataaagatcctaaaaatgaggatgcaaaactaattgattacattacaaataaccaaattgctgaattaattgagactgctggagaaagtgcaggaactgatgttactgggggaatgaaaggtaaactaatggaaattaaacaaattagtgatttggggtctgaagtacaaataatgaatattatggaagaagacagaatgtatcatgcccttgtaaatgaacctgatatcagaaccgtaattactccgaattag

SEQ ID NO: 230 - DNA, 856 bp, Artificial sequence
  Codon optimised sequence
atgaacagtgatgaactgtgcctgattaaactgggtggtgcagccattaccgataaaaccaaagattataccatgcgcccggaaattattagcagtgttctgaatgaaatcagttatagtgataagaaggcaattatcatccatggtgccggtagcttcgcccataatattgccaaagaatataaactggtgcatggtctggatagcgcagttgcacgcgatctgcaatatcgcggcgtgagtattacccgtcgcagcctgctgaatctgcataccgccgtgctggatagtgcactggaagccaatctgctgccgttcagcttcccggttagtgccatcttcgttagcgatggtgaacagcagctgtatagcaaatatctggatggcgtggttgaagccctggataaaggcttcaccccgattctgtatggcgatattagcttcgatattaaaacacacttccgcgttattagtggcgatcgcattctgcgtgtgctggttaaacatctgaaaggtctgaaacataaagataatagtctgtacttcaacaacatcaaagtgttcttcggtagtaatgttgatggtctgtatgataaagatccgaaaaatgaagatgccaaactgattgattacattaccaataatcagatcgcagaactgattgaaaccgcaggtgaaagcgcaggtaccgatgttaccggtggcatgaaaggtaaactgatggaaattaaacagatcagcgatctgggtagcgaagttcagattatgaatattatggaagaggatcgtatgtatcatgcactggttaatgaaccggatattcgtaccgtgattaccccgaattgactgaaagctt

SEQ ID NO: 231 - protein, 276 aa, Uryarchaeota archaeon
MTLYLFDDLSISTKRIMSKEKILLKFGGSLITEKMSDTPKINTINLDRIGKVLNNKEYDIIVVHGAGSFGHPIAQKFNLIDGLNESPEQKKSIAEIREQMEKLNHVLCSIIEKNGMKTKSVIPSKTMITKGARNIAKFPTEIFDKCIEEGNIPITFGDATDDELQGINILSGDVIMMELARIYKPAFSVFVMDLPGVMDGDPKSKDSKVIPRVDAKIIRELKEKTFSNGNTDVTGGLIGKLECALEIAQHSQCWITNLDSLEMVLTGNPRGSEVVL

SEQ ID NO: 232 - DNA, 831 bp, Uryarchaeota archaeon
atgacactctacctttttgacgacttatctatatctacaaagagaatcatgtctaaagaaaaaattcttttaaaatttgggggatctttaattaccgaaaaaatgagtgacacaccaaagattaataccataaatttagacagaattggaaaagttttgaataacaaagaatatgatattattgtggtccatggagccggatcattcggacatccaattgctcaaaaatttaatctaattgatggattaaacgaaagtccagagcaaaaaaaatctattgctgagataagagaacaaatggaaaaattaaatcatgttttatgtagtattattgaaaaaaatggaatgaaaactaaatctgttatcccctctaaaactatgatcactaagggtgcccgaaatatcgctaaattccctactgaaatatttgataagtgtattgaagaaggtaatatacccattacatttggtgatgctacagatgatgaattacaaggaattaatatactaagtggtgatgttataatgatggaattagcacgaatatacaaacctgctttctcagtatttgtaatggatctgcctggagtaatggatggcgatccaaaatctaaggatagtaaagttattcctagagttgacgcaaaaatcattagagaattgaaagaaaaaacatttagcaatggaaacacggatgttaccggtggattaattggaaaattggaatgtgcactcgaaatagctcagcacagccaatgttggataactaatttagactccttggagatggtattaactggtaatccaagaggaagtgaggttgttttatga

SEQ ID NO: 233 - DNA, 841 bp, Artificial sequence
  Codon optimised sequence
atgaccctgtatctgttcgatgatctgagcattagtaccaaacgcattatgagcaaagaaaaaattctgctgaagttcggcggcagcctgattaccgaaaaaatgagtgataccccgaaaattaataccattaatctggatcgtatcggtaaagtgctgaataataaagaatacgatatcatcgtggtgcatggtgcaggtagcttcggccatccgattgcccagaaattcaatctgattgatggcctgaatgaaagcccggaacagaaaaaaagtattgccgaaattcgcgaacagatggaaaaactgaatcatgttctgtgcagtattattgaaaagaatggcatgaaaaccaagagcgttattccgagcaaaaccatgattaccaaaggcgcacgtaatattgccaaattcccgaccgaaatcttcgataaatgtattgaagaaggcaatatcccgattaccttcggtgatgcaaccgatgatgaactgcaaggtattaatattctgagtggtgatgttattatgatggaactggcacgcatctataaaccggccttcagcgtgttcgtgatggatctgccgggtgtgatggatggcgatccgaaaagtaaagatagtaaagttatcccgcgtgtggatgcaaaaattattcgtgaactgaaagaaaagaccttcagtaatggtaataccgatgttaccggtggcctgattggtaaactggaatgtgccctggaaattgcccagcatagtcagtgttggattaccaatctggatagtctggaaatggtgctgaccggcaatccgcgcggtagtgaagttgtgctgtgactgaaagctt

SEQ ID NO: 234 - protein, 289 aa, Archaeon species
MRKSNINKKEIKEIPINNKKNIGLSDLVVIKFGGSSITKKADNQFEMNYEVLNQSAEELYRAIKKTKYKVALICGVGPFGHTNVKKLNLNDGIKTREQEEGTQKTIVDCNFVAQETSTALEKFGLKTKIIPGYLVCKQDNRKAISFDTKEYVKAIHGGFIPITTGTMVKDKTLKWSVMSGDTAVAELCKQLRPRKVIMGTDVDGIYTADPKVNPKAKLIESITKENVPKILEMVGESNSVDVTGGMKGKLEKLALTLNGVPGEIFNLFTKGNLEKAFIGEEIKDTKIRL

SEQ ID NO: 235 - DNA, 870 bp, Archaeon species
atgcgtaaatctaatattaacaaaaaagaaataaaagaaattcctattaataataaaaaaaatattgggttgagtgatttagtagtaataaaatttgggggttcttcaataactaaaaaagcggataatcaatttgaaatgaattacgaagtgctaaatcaatcagcagaagaactttatagagcaataaaaaaaacaaaatataaagttgcacttatttgtggggtaggcccatttggacatactaatgtaaaaaaacttaatctaaatgatgggataaaaacaagagaacaagaagaaggaacacaaaaaacaattgttgattgtaattttgttgcacaagaaacttctactgctctagaaaaattcggactcaaaacaaaaataattccagggtatttagtatgcaagcaagacaatagaaaagcaatttcatttgatactaaagaatatgtgaaagcaattcatggaggatttattccgataaccactgggacaatggttaaagacaaaactttgaaatggagtgtaatgagtggagacacagcagtagcagaactctgcaaacaattaaggccaagaaaagtaataatggggactgatgtggatggaatttatactgcggacccaaaagttaatccaaaagcaaaattaattgaaagtattacaaaagaaaatgttccaaaaattttggagatggtgggagaatcaaattcagttgatgtaactgggggaatgaaaggaaaattagaaaaactagccctaacactaaatggagtgcctggagagatatttaatttattcacaaaaggaaatttagaaaaagcatttattggagaagaaataaaagacacaaaaataagattataa

SEQ ID NO: 236 - DNA, 880 bp, Artificial sequence
  Codon optimised sequence
atgcgtaaaagcaatatcaacaagaaggaaattaaggaaatcccgattaataacaagaagaatatcggcctgagcgatctggtggtgattaaattcggtggcagtagcattaccaaaaaagccgataatcagttcgaaatgaattatgaagtgctgaatcagagtgccgaagaactgtatcgcgcaattaaaaaaaccaaatataaggttgcgctgatctgtggcgttggcccgttcggtcataccaatgttaaaaaactgaatctgaacgatggcattaaaaccagagaacaggaagaaggcacccagaaaaccattgttgattgcaacttcgttgcacaggaaaccagcaccgcactggaaaaattcggtctgaaaaccaaaattatcccgggttatctggtgtgtaaacaggataatcgtaaagcaattagcttcgataccaaagaatatgtgaaagccattcatggcggcttcattccgattaccaccggtaccatggtgaaagataaaaccttaaaatggagtgtgatgagtggcgataccgcagtggcagaactgtgtaaacagctgcgtccgcgcaaagtgattatgggtaccgatgttgatggtatctataccgcagatccgaaagtgaatccgaaagccaaactgattgaaagtattaccaaagaaaacgttccgaaaattctggaaatggttggcgaaagtaatagtgtggatgtgaccggtggtatgaaaggcaaactggaaaaactggcactgaccctgaatggtgttccgggcgaaatcttcaatctgttcaccaaaggcaatctggaaaaagcattcattggtgaagaaattaaggataccaaaatccgtctgtgactgaaagctt

SEQ ID NO: 237 - protein, 268 aa, Thorarchaeota archaeon
MIQLKHLTIVKLGGSVITHKDSTPPKVNEANLSRIANELKVHTRGELIIILGGGAHGHQAAHSHGFADPTSPKELLVKGIPPIRHNMSALASSVETSLSEEGIPAIVIPPFVSVTLRNGLIHDYPTNIIRKSLDNGLVVITHGDVCFDEENIVSILSGDTIAVYLAKELDAKTILIGTDVDGVLDDNPKTNPSAKHIPVINQENKDTILSKTGPSTNTDVTGGMSKKVTELLEISRQNREIIIFNLTVPDRLKFLLQNKTTICTRIQS

SEQ ID NO: 238 - DNA, 807 bp, Thorarchaeota archaeon
gtgatacaattgaaacacctcacaattgtgaaactaggcgggtcagtgataacacacaaagactcgactcctcctaaagtcaatgaggcaaacttgtcccgaattgccaacgaactaaaagtacatactagaggtgaactaatcattattcttggcggcggagctcacggtcaccaagccgcccattcacatggctttgctgatcctacaagtcccaaagagcttcttgtaaaaggaattccaccaatacggcataatatgtccgcacttgcatcctctgttgaaacaagtctaagcgaagaaggaatccctgcaatcgtcattcctccctttgtgtctgtaacactaagaaatggtttgatacatgattatccaaccaacataattagaaagtcattggacaatgggcttgttgtaataacccatggagatgtttgttttgatgaagaaaacattgtgtctattctcagtggggatacaattgcagtttaccttgcaaaagagctagatgcaaaaaccatactcattggaaccgatgttgacggagtcttagacgataatccaaaaacaaacccatcagccaaacacatacctgtaataaatcaagaaaacaaggacaccattctatccaaaacaggaccttcgaccaataccgatgtaacaggcggcatgtcgaaaaaagtgaccgagcttctcgaaatttctagacagaacagagagattatcatcttcaacctcacagttcccgatcgtcttaagtttctattacaaaataaaacaaccatctgcacaagaattcagtcataa

SEQ ID NO: 239 - DNA, 817 bp, Artificial sequence
  Codon optimised sequence
atgatccagctgaaacatctgaccattgttaaactgggcggcagcgtgattacccataaagatagcaccccgccgaaagtgaatgaagcaaatctgagtcgcattgccaatgaactgaaagttcatacccgcggcgaactgattattattctgggcggtggcgcccatggccatcaggctgctcatagtcatggcttcgccgatccgaccagcccgaaagaactgctggtgaaaggcattccgccgattcgtcataatatgagtgcactggcaagcagcgtggaaaccagcctgagcgaagaaggcattccggccattgttattccgccgttcgtgagtgttaccctgcgcaatggtctgattcatgattatccgaccaatattattcgtaaaagtctggataacggcctggtggttattacccatggtgatgtgtgcttcgatgaagaaaatattgttagtatcctgagcggtgataccattgcagtgtatctggcaaaagaactggatgccaaaaccattctgattggtaccgatgtggatggtgttctggatgataatccgaaaaccaatccgagcgccaaacatattccggtgattaatcaggaaaataaagataccatcctgagtaaaaccggcccgagcaccaataccgatgtgaccggtggtatgagtaaaaaagttaccgaactgctggaaattagccgccagaatcgtgaaattattatcttcaatctgaccgttccggatcgcctgaaattcctgctgcaaaataaaaccaccatctgtacccgtattcagagttgactgaaagctt

SEQ ID NO: 240 - protein, 324 aa, Streptomyces thermolilacinus
MTADVSAAPRTAPGAAPATAAAGEPGLLVLKVGGSLLSDKRHSGETDHATIDAYASQVAELVTAHPGRIVLVTGGGALCHPVGLRIKAAKDDPYAAVALTEPAFRMRWAWTTALRAHGVRAVPLQTTSMLNELADGTTVTETGVVSRLLAEGALPVLSSDCVVTATGTLRILSSDDVPGVVLDAAVAPGPVRVVALTDVAGIHLARDPDSPVLPHLDPDDLGAVRRLFWDDAWDATGAMEGKVEALAAHARRGAECVITRGDHRPGGLRHLFAPLDAWPGDVPRTLISRRTPAGPAAVTAGPTDPAATPATVTTAAQPPQEDPT

SEQ ID NO: 241 - DNA, 975 bp, Streptomyces thermolilacinus
gtgaccgccgacgtgtccgcggcgccccgcaccgcaccgggcgccgcgcccgcgacggcggcggccggggagccggggctgctcgtcctcaaggtcggcggcagcctcctctccgacaagcggcacagcggggagaccgaccacgcgaccatcgacgcctacgcgtcccaggtcgccgagctggtcaccgcgcaccccggccggatcgtcctggtcaccgggggcggcgcgctgtgccacccggtcggcctgcggatcaaggccgccaaggacgacccgtacgcggcagtcgccctcaccgaaccggccttccgcatgcgctgggcgtggaccaccgcgctgcgcgcccacggggtgcgggccgtgccgctccagaccacgtcgatgctgaacgagctggccgacggcaccaccgtcaccgagaccggtgtggtgtcccggctcctcgccgagggcgcgctgccggtgctgtccagcgactgcgtggtcaccgccaccggcaccctgcgcatcctcagcagcgacgacgtccccggtgtggtgctggacgccgccgtggcgccggggcccgtccgggtcgtggccctcaccgacgtggccggcatccacctcgcccgggacccggacagccccgtgctgccgcacctcgaccccgacgacctcggggccgtacggcggctgttctgggacgacgcgtgggacgccaccggggccatggagggcaaggtcgaggcgctcgccgcgcacgcccgccgcggcgccgagtgcgtcatcacccgcggcgaccaccggccgggcgggctgcgccacctgttcgccccgctcgacgcctggcccggcgacgtcccccgcacgctgatcagccgccgtacccccgccgggcccgcagccgtcaccgcgggcccgacggacccggccgccacccccgccaccgtcaccaccgccgcccaaccgccccaggaggacccgacatga

SEQ ID NO: 242 - DNA, 985 bp, Artificial sequence
  Codon optimised sequence
atgaccgccgatgtgagcgccgcaccgcgtaccgcaccgggtgcagcacctgctaccgccgcagcaggcgaaccgggtctgctggtgctgaaagtgggtggcagtctgctgagtgataaacgtcatagcggtgaaaccgatcatgccaccattgatgcatacgctagtcaggtggccgaactggtgaccgcacatccgggtcgtattgtgctggttaccggtggtggtgccctgtgccatccggtgggtctgcgcattaaagcagccaaagatgatccgtatgcagcagttgccctgaccgaaccggcattccgtatgcgttgggcatggaccaccgcactgcgtgcccatggtgttcgcgccgtgccgctgcaaaccaccagcatgctgaatgaactggcagatggtaccaccgtgaccgaaaccggcgttgtgagtcgcctgctggcagaaggtgcactgccggttctgagcagcgattgcgttgttaccgcaaccggcaccctgcgcattctgagcagcgacgatgtgccgggcgtggtgctggatgcagccgtggctccgggtccggttcgtgtggtggccctgaccgatgttgccggcattcatctggcacgcgatccggatagtccggttctgccgcatctggaccctgatgatctgggtgccgttcgtcgcctgttctgggatgatgcctgggatgccaccggcgcaatggaaggcaaagttgaagcactggcagcacatgcacgtcgcggtgcagaatgtgtgattacccgtggtgatcatcgcccgggtggcctgcgccatctgttcgctccgctggatgcctggccgggtgatgtgccgcgtaccctgattagccgtcgtaccccggccggcccggctgccgttaccgcaggtcctaccgatccggcagccaccccggcaaccgttaccaccgccgctcagccgccgcaggaagatccgacctgactgaaagctt

SEQ ID NO: 243 - protein, 166 aa, Solanum tuberosum
MTEADISMVIKAIDAGFIPVLHGDAVLDTLQECTILSGDMIIRHLAAELKPEFVVFLTDVLGVYDRPPVEPGAVLIREIAVREDGSWSVVKPKLEDTSKPVEFTVAAHDTTGGMVTKITEAAMIAKLGIDVYITKAGTDHSVKALSGFLKGGIPDDWLGTAIRYMS

SEQ ID NO: 244 - DNA, 501 bp, Solanum tuberosum
atgacggaggctgacatttccatggtcattaaagctattgatgctggttttatacctgttctgcatggagatgcagttctggatacattacaggagtgcactattctgagtggagacatgataatacgtcatttagcagctgaactaaagccagagtttgttgtttttcttacagatgttcttggtgtatatgatcgtccaccagtagaacctggcgctgtacttatccgggaaatagctgtacgtgaagatggaagctggtcggtagtgaaacctaaactagaagatacaagcaagcctgttgaattcacggtagctgcacatgatacaactggtgggatggtaacaaaaataacagaagctgccatgattgcgaagcttgggattgatgtctacataactaaggcaggaacagaccattcagtgaaagcccttagtggattcttgaagggtggcatacctgatgactggctcggaacagccattcgttacatgagctga

SEQ ID NO: 245 - DNA, 511 bp, Artificial sequence
  Codon optimised sequence
atgaccgaagcagatattagtatggtgattaaagccattgatgccggcttcattccggttctgcatggcgatgccgtgctggataccctgcaagaatgcaccattctgagcggtgatatgattattcgccatctggccgccgaactgaaaccggagttcgttgtgttcctgaccgatgtgctgggcgtgtatgatcgcccgccggttgaaccgggcgccgttcttattcgcgaaattgccgtgcgcgaagatggtagctggagtgttgttaaaccgaaactggaagataccagtaaaccggtggagttcaccgtggcagcccatgataccaccggcggtatggtgaccaaaattaccgaagccgcaatgattgccaaactgggcattgatgtgtatattaccaaagcaggcaccgatcatagtgttaaagcactgagcggcttcctgaaaggtggtattccggatgattggctgggcaccgcaattcgctatatgagttgactgaaagctt

SEQ ID NO: 246 - protein, 252 aa, Euryarchaeota archaeon
MKVLKIGGSVLTEKHTEEKKVRMEVLDRIASEIAPRADGLILVHGAGSFGHPEAIRHGVGRRFSTEGVLKTHQSVCLLNRIVVSALVRGGVPAVPVSPLGCAIADGGRLVSMEMTPILHMVERGLVPVLHGDVVMDRTLGAAVVSGDALVAHIAKGLGAHHVGMGTSAQGVLDAHGRTIPEVTEHNIEQVRQWVRPSGGGDATGGMVGKVEELWRLAGEGIESWVFSALDEGAVAAFLDGHPVGTRVRNVEL

SEQ ID NO: 247 - DNA, 759 bp, Euryarchaeota archaeon
gtgaaggtgctgaagataggcggaagcgtgctcacagagaagcacacagaggaaaagaaggtaaggatggaggtgctcgaccgcattgcttctgagattgccccacgggcagatgggctgatactggtgcacggagctggctcattcgggcatcccgaggcgataaggcacggggtgggcaggaggttcagcaccgagggtgtgctaaagacccaccagagcgtgtgccttctcaacaggatagtggtgagcgcactcgtgagagggggcgtgcccgccgtcccggtgtccccactgggctgtgccatcgcagatggcggaaggctcgtatccatggagatgacgcccatactccacatggtggagcgtggactcgtgcctgtgctgcacggcgatgtggtgatggatcgcacccttggagcggcagtggtgtctggagacgcgctcgtggcgcacatcgcaaagggactgggtgcgcaccacgtgggcatgggcacgagtgcacagggggtgctggatgcccatggacgcaccattccggaagtaacggagcacaacatcgagcaggttagacaatgggtgcgtccctctggaggcggggatgccactggaggaatggtcggaaaggtggaggagctgtggaggctggcgggcgagggcatagagtcgtgggtgttcagcgccctcgatgagggggcggtggcggcgtttctagatgggcatccagtgggcacgagggtgagaaatgttgaactatga

SEQ ID NO: 248 - DNA, 769 bp, Artificial sequence
  Codon optimised sequence
atgaaggttctgaaaatcggtggcagcgttctgaccgaaaaacataccgaagaaaaaaaagtgcgcatggaagttctggatcgcattgccagtgaaattgccccgcgtgccgatggcctgattctggtgcatggtgcaggtagcttcggtcatccggaagccattcgccatggtgtgggtcgtcgcttcagcaccgaaggtgtgctgaaaacacatcagagcgtgtgtctgctgaatcgtattgttgtgagcgcactggtgcgcggtggcgtgcctgccgttcctgtgagtccgctgggttgtgcaattgcagatggtggccgcctggttagcatggaaatgaccccgattctgcacatggttgaacgcggtctggtgccggtgctgcatggtgatgtggttatggatcgtaccctgggcgcagcagttgtgagcggcgatgccctggtggcacatattgcaaaaggcctgggtgcccatcatgttggcatgggcaccagtgcccagggcgtgctggatgcccatggtcgtaccattccggaagtgaccgaacataatattgaacaggtgcgccagtgggttcgtccgagtggtggcggcgatgcaaccggtggcatggtgggtaaagtggaagaactgtggcgtctggcaggtgaaggtattgaaagttgggtgttcagtgcactggatgaaggcgcagttgcagccttcctggatggccatccggtgggcacccgtgtgcgcaatgttgaactgtgactgaaagctt

SEQ ID NO: 249 - protein, 263 aa, Archaeon species
MNPLIVKLGGSVITDKAKEFSMKRGEIERLAKELTSVDGPLVVVHGGGSFGHPLASEYEIDSGYKDDLQLMGFTLTHHAMQKLNFEVVDSLHGANLLAVSIQPSACTIVRNGRIISIELEPLRKLLDLGFVPVLHGDSVPDLDKGMSILSGDQLVVFLARELKADSVILGVDTDGVCTGDPKQGEKVELIPKITPKSWPRIADSLTPSPVFDVTGGMRRKVEELMKLPEIGIEAQIVNASKPKILEKAINGDKSLGTRIVEGS

SEQ ID NO: 250 - DNA, 792 bp, Archaeon species
atgaatcctttgattgtaaaacttggcggaagcgtgataacggataaggccaaggaattttcaatgaaacggggggaaattgaacgtcttgcaaaggagttgacctcggttgatggcccacttgtggtggttcatggtgggggttcgtttggtcaccccctcgcctctgaatacgaaattgattcaggatataaagatgaccttcagcttatgggcttcaccttgacccaccatgcgatgcagaagctcaacttcgaggtggtagattctctgcatggggccaatctgctagcagtctcgattcaaccatcagcatgcacgatcgttaggaacgggagaattatttccatagagcttgaacctcttcgtaagttactggatttgggctttgttcccgtattgcatggcgatagcgttccggatctcgataagggcatgagtatactgtccggcgatcagcttgtcgtttttttggcccgagaattaaaagcagatagtgtgatacttggagttgacacggatggggtttgtacgggcgatcctaagcaaggcgagaaggtagaactcataccaaagataacgcccaaaagctggccaagaatcgctgactccctcacgccatctcccgtttttgacgttaccggggggatgagaaggaaggtcgaagagttaatgaaattacccgaaataggtatcgaggcacagatagtaaatgcatctaagcctaaaatccttgaaaaagcaatcaacggcgataaaagcttgggaacaaggatagttgagggtagctaa

SEQ ID NO: 251 - DNA, 802 bp, Artificial sequence
  Codon optimised sequence
atgaacccgctgattgttaaactgggcggcagtgttattaccgataaagcaaaagagttcagtatgaaacgcggcgaaattgaacgtctggccaaagaactgaccagcgttgatggtccgctggttgtggttcatggcggtggtagcttcggtcatccgctggccagtgaatatgaaattgatagcggctataaagatgatctgcaactgatgggcttcaccctgacccatcatgcaatgcagaaactgaacttcgaagttgttgatagtctgcatggtgcaaatctgctggcagtgagtattcagccgagtgcatgtaccattgttcgcaatggtcgcattattagtattgaactggaaccgctgcgtaaactgctggatctgggcttcgtgccggtgctgcatggtgatagcgttccggatctggataaaggcatgagcattctgagtggcgatcagctggttgtgttcctggcacgtgaactgaaagcagatagcgttattctgggtgtggataccgatggtgtgtgcaccggcgatccgaaacagggtgaaaaagttgaactgattccgaaaattaccccgaaaagctggccgcgtattgccgatagcctgaccccgagtccggtgttcgatgttaccggtggcatgcgtcgtaaagttgaagaactgatgaaactgccggaaattggtattgaagcacagattgtgaatgccagtaaaccgaaaattctggaaaaagccattaatggcgataaaagcctgggcacccgtattgtggaaggtagttgactgaaagctt

SEQ ID NO: 252 - protein, 260 aa, Nethanofastidiosum methylthiophilus
MIIIKAGGSAITKKSEDFTPNMEVISNLAQEIKEAGRVSILVHGAGSYGHPIAKKYSLGKGYFDDYQLKGFSETRASVSELDSIVLKSLMKNGLTPVKIGTFSNFITSNGRIVEFHKEPLLRAIELGLLPVFTGDLVFDRTRVFSILSGDQIVSYLSRLLKPSRVVFGTDVDGIYTGDPKKENVKLIDTVTEENIKEVFKFAKDTGDASGGMEGKLSEILPIFDMGIEIDVINLTKKGNLAETLRGNVKGTVIKKKNISK

SEQ ID NO: 253 - DNA, 783 bp, Methanofastidiosum methylthiophilus
atgattattataaaagcaggcggttcggcaattacaaaaaaaagcgaagattttaccccaaatatggaagtaatttctaatcttgctcaagagatcaaagaggcaggaagagtatccatccttgttcatggtgctggatcttatgggcacccgattgcaaagaaatattctctagggaaaggttattttgatgattaccaacttaaaggattttctgaaacaagagccagtgttagtgaacttgacagcatagttctaaaatctcttatgaaaaatggactaactcctgttaaaataggcactttttcaaattttatcacatctaatggtagaattgttgaattccataaagaacctctactaagagctattgaacttgggctattacctgtgtttactggcgatttagtctttgatagaactagagttttctcaatattatcgggagatcaaatagtctcatatctatcaagattgttaaaaccttcaagagttgtatttgggactgatgtcgatggcatatatacaggagatccaaagaaagaaaatgtcaagttgattgatacagttacagaagaaaatattaaagaagtatttaagtttgcgaaagatactggagacgcttctggcggtatggaaggtaaactatctgagatattacccatatttgatatgggtattgagatagatgttattaatttaactaaaaaaggtaatttagctgaaacacttaggggaaatgtaaaaggaactgtaataaaaaagaagaatatctcaaaataa

SEQ ID NO: 254 - DNA, 793 bp, Artificial sequence
  Codon optimised sequence
atgatcatcatcaaggccggcggtagtgccattaccaaaaaaagtgaagacttcaccccgaatatggaagtgattagtaatctggcacaggaaattaaagaagcaggccgcgttagtattctggtgcatggtgccggcagttatggccatccgattgcaaaaaaatatagcctgggcaaaggctacttcgatgattatcagctgaaaggcttcagtgaaaccagagcaagcgtgagcgaactggatagtattgttctgaaaagcctgatgaaaaatggcctgaccccggttaaaattggcaccttcagcaacttcattaccagcaatggtcgcattgttgagttccataaagaaccgctgctgcgtgcaattgaactgggcctgctgccggtgttcaccggcgatctggtgttcgatcgcacccgtgtgttcagcattctgagcggtgatcagattgttagttatctgagtcgtctgctgaaaccgagtcgtgttgtgttcggtaccgatgttgatggcatctataccggcgatccgaaaaaagaaaatgttaaactgatcgataccgtgaccgaagaaaatattaaagaagtgttcaagttcgcaaaggataccggtgatgcaagtggcggcatggaaggtaaactgagcgaaattctgccgatcttcgatatgggtattgaaattgatgtgattaacctgaccaaaaaaggtaatctggccgaaaccttacgtggtaatgttaaaggtaccgttattaaaaagaagaacatcagtaagtgactgaaagctt

SEQ ID NO: 255 - protein, 255 aa, Syntrophoarchaeum butanivorans
MGKGLTILKIGGSVITCKNDEKRLREDTINQVVREIADARTDHLILVHGAGSFGHPQAAKHSEFGEDLVKNAFAVFDINTTVMELNTILVSSMISQGLPAVALHPMNFTILEDGRIYSMMTTQIEEMLDKGFVPVLHGDIVFDRKKGYAILSGDQIVTYLARDLQAQRVGLGVDVDGVIGSDGSVMEVITPQNVDEIIFDKGADLDVTGAMEGKVRELLELASYGISSCIFNGTKKGYIRRWLKGEKIPSTIISE

SEQ ID NO: 256 - DNA, 768 bp, Syntrophoarchaeum butanivorans
atggggaagggtctgacgattctcaagatcggaggaagtgtgattacctgtaagaacgatgaaaagcggctcagagaggataccatcaatcaggttgtgagagagatcgcagatgccaggaccgatcatctaattctcgtgcatggtgcaggctcgttcggtcacccacaggctgcaaagcactcagagttcggggaggatctggtaaaaaatgcgtttgcagtctttgatataaatacgaccgtgatggagcttaacaccatcctcgtctcaagtatgatctcacagggtcttcctgcggttgcgcttcacccgatgaacttcacaatccttgaggacgggaggatttactcgatgatgactactcagatcgaggagatgcttgataagggtttcgtcccggttctgcatggtgatattgttttcgatcgtaagaaggggtatgccatcctctcaggggatcagatcgtgacatatcttgcgagagatcttcaggcacagagggtagggcttggagtcgatgttgatggggtcatcgggagtgatgggagtgttatggaggtcatcacaccgcagaatgtggatgagataatcttcgacaagggggcagatcttgatgttaccggggcaatggagggaaaggtcagagagcttcttgagcttgcctcgtatggaataagctcgtgtatcttcaatgggacaaagaaaggctacatcagacgatggcttaaaggggagaagataccatccacaatcatatcagagtag

SEQ ID NO: 257 - DNA, 778 bp, Artificial sequence
  Codon optimised sequence
atgggtaaaggcctgaccattctgaaaattggcggtagcgtgattacctgtaaaaatgatgaaaaacgcctgcgtgaagataccattaatcaggttgtgcgcgaaattgcagatgcccgcaccgatcatctgattctggtgcatggcgcaggcagcttcggtcatccgcaggcagcaaaacatagcgagttcggtgaagacttagttaaaaatgcattcgccgtgttcgatattaataccaccgtgatggaactgaataccattctggtgagtagcatgattagccagggcctgccggcagtggccctgcatcctatgaacttcaccattctggaagatggccgtatctatagtatgatgaccacccagattgaagaaatgctggataaaggcttcgtgccggttctgcatggtgatattgtgttcgatcgcaaaaaaggctatgcaattctgagcggcgatcagattgttacctatctggcccgtgatctgcaagcccagcgtgttggtctgggcgtggatgttgatggtgttattggtagcgatggcagtgtgatggaagtgattaccccgcagaatgtggatgaaattatcttcgataaaggcgcagacttagatgttaccggtgccatggaaggtaaagtgcgtgaactgctggaactggccagttatggtattagcagttgcatcttcaatggcaccaaaaaaggttatattcgtcgttggctgaaaggtgaaaaaattccgagtaccattattagtgaatgactgaaagctt

SEQ ID NO: 258 - protein, 254 aa, Euryarchaeota archaeon
MMLIKLGGSAITDKSKPLTSRAGDIKRLAMEIAGAEGTKMIVHGGGSFGHIKAAEFKLNEGFVDDSQREGICLVQKDMRKLNAIVVDAFREAGVPVASVPAGAITLFDNGQMVKFPSEVFIHYVKLGIVPITFGDVVVDRARGISICSGDDIMLQLAKDTDAVKCVFVTSVDGIFESYPPGKDEEPLSEVGPDTVIRFSSEDVDVTGSMKRKLDLMIEMASSGKEVAVVNGLVPDRLTDALKGNDFIGTRVKGD

SEQ ID NO: 259 - DNA, 765 bp, Euryarchaeota archaeon
atgatgctcatcaagctgggtggcagcgccatcacagataaatccaagcccctgacctcacgtgccggggacatcaagaggctggcgatggagatcgccggcgccgagggtacaaagatgatcgtgcacggcgggggctccttcggccacatcaaggctgccgagttcaagctcaacgagggctttgtcgacgacagccagagagagggcatctgcctagtccagaaggatatgcgcaagttgaacgccatcgtcgtcgatgcattcagggaggcgggtgtccccgtggcatccgtcccggccggggccataacgctcttcgacaacggccaaatggttaaattcccctccgaggtctttatccattacgtgaagctgggcatcgttccgattaccttcggcgacgttgtcgtcgacagggctaggggcatatcgatatgctcgggagacgacataatgctccagcttgccaaggataccgatgctgtaaaatgcgtgttcgtgacctcggtggacggcatcttcgaatcctatcccccagggaaggacgaggagcctctcagcgaggtcggtccggacaccgtcatcaggttcagtagcgaggacgtggacgtgacgggcagcatgaagcgcaaactcgacctgatgatcgagatggcctcgtcaggtaaggaggtggccgtcgtgaacggtcttgtgcctgacagattgaccgatgcattgaagggtaatgacttcattggcacccgggtgaagggtgattga

SEQ ID NO: 260 - DNA, 775 bp, Artificial sequence
  Codon optimised sequence
atgatgctgattaagctgggcggtagcgcaattaccgataaaagtaaaccgctgaccagtcgcgcaggcgatattaaacgcctggccatggaaattgcaggcgccgaaggcaccaaaatgattgtgcatggtggtggcagcttcggtcatattaaagcagcagagttcaaactgaatgaaggcttcgtggatgatagtcagcgcgaaggcatctgtctggtgcagaaagatatgcgtaaactgaatgccattgtggtggatgccttccgcgaagcaggcgtgccggttgccagcgtgccggcaggtgctattaccctgttcgataatggtcagatggttaaattcccgagtgaagtgttcattcattatgttaaactgggtattgtgccgattaccttcggtgatgtggtggttgatcgtgcccgtggcattagcatctgtagcggtgatgatattatgctgcaactggcaaaagataccgatgccgttaaatgcgtgttcgttaccagtgtggatggtatcttcgaaagctatccgccgggcaaagatgaagaaccgctgagtgaagtgggcccggataccgtgattcgcttcagtagcgaagatgtggatgttaccggtagtatgaaacgtaaactggatctgatgattgaaatggcaagcagtggcaaagaagttgccgtggttaatggcctggttccggatcgcctgaccgatgcactgaaaggtaatgacttcattggcacccgcgttaaaggtgattgactgaaagctt

SEQ ID NO: 261 - protein, 239 aa, Archaeoglobus profundus
MIVVKIGGSAITDKKGFKIVKIDSIERVAKDIAEVRPRKLILVHGVGSFGHPFVVKYRLKEEKNLEGVVRAHMSCKELNAMICEAMLMYGLKPFPVHPLLTFKLRGGKITFDIDIFEKALEEGFIPVTHGDMVYDVEDRFFKVLSGDDITLKLAKAFKAEKIGFATDVEGVYVDGKLADVVTWKDLDKIGFSKGVDVTGGMRSKVEKILRSGVNARIFSISKFKGFLSCEEVGTLVKSD

SEQ ID NO: 262 - DNA, 720 bp, Archaeoglobus profundus
atgatagtagtcaagattggtggatctgcaataacagataagaaggggttcaaaatagttaagatcgattctatagagagagttgctaaagatattgccgaagtaagacccagaaaacttattcttgttcacggtgtgggttcctttggtcacccctttgtagttaagtacaggcttaaggaggagaaaaacttggagggtgttgttagagcgcatatgtcatgcaaggagctgaacgctatgatttgtgaggctatgctcatgtatggcttgaaaccttttccagttcatccccttctaacgttcaaacttcgtgggggcaagataacatttgacatcgacatcttcgaaaaggcacttgaggaaggattcatacccgtaactcatggggacatggtctacgatgtggaggacagatttttcaaggttctttccggcgatgacataacgctgaagcttgccaaggcttttaaggctgaaaagattggttttgctactgatgttgaaggagtttacgttgacgggaaattagctgatgtggtgacttggaaagatttggacaagattggattctccaaaggagttgatgtgaccggtgggatgagaagcaaggtcgagaagattttgaggagcggtgtgaatgctagaatttttagcatttcaaagtttaaggggtttctaagctgtgaagaagtaggaacgctcgttaaatctgactga

SEQ ID NO: 263 - DNA, 730 bp, Artificial sequence
  Codon optimised sequence
atgatcgtggtgaaaattggtggcagcgccattaccgataaaaaaggcttcaaaattgtgaaaatcgacagcattgaacgcgttgcaaaagatattgcagaagttcgtccgcgtaaactgattctggttcatggtgtgggtagcttcggccatccgttcgtggttaaatatcgtctgaaagaagaaaaaaacctggaaggtgttgtgcgcgcacacatgagttgcaaagaactgaatgcaatgatctgtgaagccatgctgatgtatggcctgaaaccgttcccggttcatccgctgctgaccttcaaactgcgcggtggcaaaattaccttcgatattgatatcttcgagaaagcactggaagaaggcttcattccggtgacccatggtgatatggtgtatgatgtggaagatcgcttcttcaaagtgctgagtggcgatgatattaccctgaaactggccaaagccttcaaagcagaaaaaattggcttcgccaccgatgtggaaggcgtgtatgtggatggcaaactggccgatgttgtgacctggaaagacttagataaaattggcttcagcaaaggcgttgatgttaccggtggcatgcgcagcaaagtggaaaaaattctgcgtagcggcgttaatgcacgtatcttcagtattagcaaattcaaaggcttcctgagctgtgaagaagttggcaccctggtgaaaagtgattgactgaaagctt

SEQ ID NO: 264 - protein, 253 aa, Halopenitus malekzadehii
MTGETVVCKLGGSVITEKDRSETLDAPALDAACDAIAGVLADDAIDRLVVVHGGGSFGHHHASAHGMTTTAGTHNVDAVMDVHGAMTTLNRFVLDRLHERNVPALPVHPLSVGARTGGPDGELTLPSEPAATLLAEGFVPVLHGDGVATASEGVTVISGDELVVELAADIDADRVGLCSTVPGVLDGDGDVVPRIDAFEDVADLLGASESTDVSGGMAAKVEELLGLGSPAFIFGPDDLEGFLRGDSPGTRIG

SEQ ID NO: 265 - DNA, 762 bp, Halopenitus malekzadehii
atgacgggtgagacggtcgtctgcaagctcggcggcagcgtgatcaccgagaaggatcggtccgagacgctcgatgcgcccgcgctcgatgctgcctgcgacgcgatcgccggggtgctggcggacgacgccatcgaccgactcgtcgtcgttcacggtggcgggagcttcggccaccatcacgccagcgcacacgggatgaccacgaccgcggggacccataacgtcgacgccgtgatggacgttcacggcgcgatgacgacgctcaaccggttcgtcctcgaccggctgcacgaacggaacgttccggcgcttccagtccacccgctatcggtcggcgcacggacgggcgggccggacggggagctgacgctgccgtcggagcccgccgcgacgctgcttgcggaggggtttgttccggtgttacacggtgacggggtcgccaccgcgagcgagggcgtgacggtgatctcgggcgacgaactggtcgtcgagctggctgccgacatcgatgcggaccgggtcggcctctgttcgacggttcccggcgtcctcgacggcgacggtgacgtggttccccggatcgacgccttcgaagacgtcgccgacctgctcggcgcgagcgagtcgacggacgtctcgggcgggatggcggcgaaggtcgaggagctgctcgggctcggatcgccggcgttcatcttcggcccggacgacctcgagggatttctgcgaggcgactcgcccgggacgcggatcgggtag

SEQ ID NO: 266 - DNA, 772 bp, Artificial sequence
  Codon optimised sequence
atgaccggcgaaaccgttgtgtgtaaactgggcggtagcgttattaccgaaaaagatcgcagtgaaaccttagatgccccggccctggatgccgcatgtgatgcaattgcaggtgtgctggcagatgatgccattgatcgtctggtggtggttcatggcggtggtagcttcggccatcatcatgcaagcgcacatggcatgaccaccaccgcaggtacccataatgttgatgccgttatggatgtgcatggtgcaatgaccaccctgaatcgcttcgttctggatcgtctgcatgaacgtaatgttccggccctgccggtgcatccgctgagcgttggtgcacgtaccggcggtccggatggtgaactgaccctgccgagtgaaccggccgccaccctgctggcagaaggcttcgttccggtgctgcatggcgatggtgttgcaaccgcaagcgaaggcgtgaccgttattagcggcgatgaactggttgtggaactggccgccgatattgatgccgatcgtgttggtctgtgtagtaccgttccgggtgttctggatggtgatggtgatgtggtgccgcgtattgatgccttcgaagatgttgcagacttactgggtgccagtgaaagcaccgatgttagtggtggcatggcagccaaagtggaagaactgctgggcctgggtagtccggccttcatcttcggtccggatgatctggaaggcttcctgcgcggcgatagcccgggcacacgcattggttgactgaaagctt

SEQ ID NO: 267 - protein, 247 aa, Methanosarcinales archaeon
MKSILLKIGGSVLTDKERECTLRESEIERIAGEIKGARASVVIVHGAGSFGHPQAREHNLGEDPTTRGLIETHRAVMKLNNAFIEALNRADVDAIGVHPLDFIMVEERRVTHLDCRVLESMIEFGLTPVLHGDVVIDSKRGASVISGDQILRELGIRLDVSMVGAGTNVDGVFDETGRTIPKLNRIPQQIHPSVIEDVTGEMKGKVKELIELAENGVESVIFNASMKRKVYDFLRGKDVGGTQITLQ

SEQ ID NO: 268 - DNA, 744 bp, Methanosarcinales archaeon
gtgaagtctatcctattgaagatcggtggaagcgtgctgaccgataaggagcgtgagtgcacgcttcgagaatctgagattgagcggattgcaggcgaaattaaaggtgccagagccagtgttgtgatcgttcacggtgctggctcgttcggacacccacaggcaagagagcacaacctcggggaagatccgacaacgaggggtttgattgagacgcacagagcggtcatgaagctgaacaacgccttcatcgaggctctcaaccgagcagacgtcgatgcaatcggcgtacacccacttgacttcataatggttgaagagaggcgtgttacacaccttgattgcagggttcttgagagcatgatcgagttcgggctcacaccagttctccacggagatgttgttatagactcgaagaggggtgcatctgtgatctcaggagaccagatcctaagagagcttggaattagactggatgtctcaatggtcggcgccgggaccaacgttgatggcgtgttcgacgaaacgggcagaacgattccgaagttgaatcggatccctcagcagatacacccctcagttatagaggatgtgacaggcgagatgaaaggaaaagtaaaagaactcatagaacttgcagaaaacggcgtagaatctgttatattcaacgcatccatgaagaggaaggtttacgattttctcagaggaaaagatgttggcggaacacagataactctacagtaa

SEQ ID NO: 269 - DNA, 754 bp, Artificial sequence
  Codon optimised sequence
atgaagagcattctgctgaaaattggcggtagcgtgctgaccgataaagaacgtgaatgcaccctgcgtgaaagcgaaattgaacgcattgcaggcgaaattaaaggtgcacgcgccagcgttgtgattgttcatggcgccggcagcttcggccatccgcaggcacgtgaacataatctgggtgaagatccgaccacccgtggtctgattgaaacacatcgtgcagtgatgaaactgaataatgccttcattgaagcactgaatcgcgcagatgttgatgcaattggtgttcatccgctggacttcattatggttgaagaacgccgcgtgacccatctggattgtcgcgttctggaaagcatgattgagttcggcctgaccccggttctgcatggtgatgttgtgattgatagtaaacgtggtgccagcgtgattagtggcgatcagattctgcgcgaactgggcattcgcctggatgtgagcatggttggtgcaggtaccaatgttgatggcgtgttcgatgaaaccggccgcaccattccgaaactgaatcgtattccgcagcagattcatccgagtgttattgaagatgttaccggcgaaatgaaaggtaaagtgaaagaactgattgaactggcagaaaatggtgttgaaagtgtgatcttcaatgcaagtatgaaacgcaaagtgtatgacttcctgcgtggtaaagatgtgggcggcacccagattaccctgcaatgactgaaagctt

SEQ ID NO: 270 - protein, 248 aa, Euryarchaeota archaeon
MMLVKLGGSVITDKSKKYVFREKTVRRLAEEIKNSGEKVIVVHGAGSFGHILAKKYRLDKGLIHDRQVKGVAVVQRDVKNLNLKVVNCLIGAGMNPVSIPPSSVAECRNKKIEKINLDVFKKYLNLGLTPVTFGDVALDRKLSFCIVSGDLLMLELARVFKPKKSIFVSDVDGVYINGKMVEKVDRKIIQNLERKKTKISDVTGSMYEKVKIALKMSEFTKTVIINGNVKGRLGDTLKGKKVVGTVVG

SEQ ID NO: 271 - DNA, 747 bp, Euryarchaeota archaeon
atgatgcttgttaaacttggcggctctgttataacagacaaatcaaaaaaatatgttttcagagaaaaaactgtgagaagactggcagaggagataaaaaactcaggtgaaaaggttattgttgttcacggtgctggctcttttgggcacatacttgcaaaaaaatacaggctggataaaggcctcattcatgataggcaggttaagggtgttgctgttgttcaaagagatgtgaagaatttgaatctaaaggttgttaactgcctgataggtgcaggtatgaaccctgtttctatccctccatcatctgtcgctgaatgcagaaacaaaaagattgaaaaaataaatcttgatgttttcaaaaaatatcttaaccttggtttgacacctgtcacgttcggtgatgtcgcgcttgacaggaaactcagtttctgcatagtctcaggtgatttactcatgcttgaacttgccagagtgtttaaaccaaaaaaatctatttttgtttctgatgttgacggtgtttacataaatgggaagatggtggaaaaggttgacagaaaaattattcagaatctggaaagaaaaaaaacaaaaatttctgatgttacaggctcaatgtatgaaaaggtaaaaatagcattaaaaatgtcagaatttacaaaaacagtaataatcaatggaaacgttaaaggcagattaggggatacattaaagggaaaaaaggttgttggtacggtggtaggatga

SEQ ID NO: 272 - DNA, 757 bp, Artificial sequence
  Codon optimised sequence
atgatgctggttaaactgggcggtagtgttattaccgataaaagcaaaaaatacgtgttccgtgaaaaaaccgttcgtcgtctggccgaagaaattaaaaatagtggtgaaaaagtgatcgtggtgcatggtgcaggcagcttcggccatattctggccaaaaaatatcgcctggataaaggcctgattcatgatcgtcaggtgaaaggtgtggcagttgtgcagcgcgatgttaaaaatctgaatctgaaagttgtgaactgcctgattggcgcaggcatgaatccggttagtattccgccgagcagtgtggcagaatgccgcaataaaaaaattgaaaaaatcaacctggacgtgttcaaaaaatatctgaatctgggcctgaccccggttaccttcggcgatgtggccctggatcgtaaactgagcttctgcattgtgagcggtgatctgctgatgctggaactggcccgcgtgttcaaaccgaaaaaaagcatcttcgtgagtgatgttgatggtgtgtatattaatggcaaaatggtggaaaaagtggatcgcaaaattattcagaatctggaacgtaaaaagaccaaaattagcgatgtgaccggcagtatgtatgaaaaagttaaaattgccctgaagatgagcgagttcaccaaaaccgttattattaatggcaatgtgaagggccgcctgggcgataccctgaaaggtaaaaaagtggttggtaccgttgtgggctgactgaaagctt

SEQ ID NO: 273 - protein, 251 aa, Methanothermus fervidus
MIIIKIGGSVITDKNSKYPKLNKKNLKRVCKEICEVMPFPLILVHGAGSFGHPIVKKYDIIANPNKKGFCIVHYWVKKLNLYVCRYLLKYGMDVVSIQPSSCIIASDGFIDYFNVKIIERYLEKEIVPVLYGDIVLDKSLEFSVISGDQIVRYLGEKMKANKIILATDVDGVYDKDPKKHKDAKLIKRIKPEDKIKLKDFKEDVTGGMAGKVSELLKLAEKGVKSEIVNAKKKNRLKKLLLGKRVRRTIIG

SEQ ID NO: 274 - DNA, 756 bp, Methanothermus fervidus
atgattattattaagataggtggtagtgttatcactgataaaaattcaaaatatcctaaattaaataaaaaaaatttgaaaagggtttgtaaggaaatttgtgaagttatgcccttccctttaattttggtacatggggcaggatcatttggccatccaatcgtaaaaaaatatgatattattgctaatcccaataaaaaaggtttttgtattgtccactattgggtaaaaaagttaaatctttatgtttgtaggtatctacttaaatatggtatggatgtagtatccatacaaccttcttcatgtattatagcatctgatgggtttatagattattttaatgtaaaaattattgagcgatatttagaaaaagaaatcgttcctgtgttatatggggatatagtattagataaatcattagagttttctgttatttctggagatcaaattgtaagatatttaggagaaaaaatgaaagctaataaaattatattggctacagatgttgatggtgtatatgataaggatccaaaaaaacataaagatgcaaaattaataaaaaggataaaacctgaagataaaatcaaattaaaagattttaaagaagacgtaacaggaggtatggcaggcaaagtttcagaacttttaaaattagcagaaaaaggtgtaaaatctgagattgtaaatgcaaaaaagaaaaacagattgaaaaaattactacttgggaaaagagtccgtagaacaataataggttaa

SEQ ID NO: 275 - DNA, 766 bp, Artificial sequence
  Codon optimised sequence
atgatcatcatcaagatcggtggtagcgttattaccgataaaaatagtaaatacccgaagctgaataagaaaaatctgaaacgcgtgtgtaaagaaatctgtgaagtgatgccgttcccgctgattctggtgcatggcgcaggcagcttcggccatccgattgtgaaaaaatatgatattatcgccaacccgaataaaaaaggcttctgtattgttcattactgggtgaaaaaactgaatctgtatgtgtgtcgttatctgctgaaatatggtatggatgtggtgagtattcagccgagcagctgtattattgcaagcgatggcttcattgattacttcaatgtgaaaattatcgagcgctatctggaaaaagaaattgttccggtgctgtatggtgatattgtgctggataaaagcctggagttcagtgttattagtggcgatcagattgttcgttatctgggtgaaaagatgaaagcaaataaaattatcctggccaccgatgttgatggcgtgtatgataaagatccgaaaaaacataaggacgcaaaactgattaagcgcattaaaccggaagataaaattaaactgaaggacttcaaggaagatgttaccggtggcatggcaggtaaagttagcgaactgctgaaactggcagaaaaaggtgtgaaaagcgaaattgtgaatgcaaaaaaaaagaaccgcctgaaaaaactgctgctgggtaaacgcgtgcgtcgcaccattattggttgactgaaagctt

SEQ ID NO: 276 - protein, 270 aa, Tumebacillus algifaecis; identical to SEQ ID NO: 106

SEQ ID NO: 277 - DNA, 813 bp, Tumebacillus algifaecis; identical to SEQ ID NO: 107

SEQ ID NO: 278 - DNA, 823 bp, Artificial sequence
  Codon optimised sequence
atgaacgttgttaagatcggcggcagtctgctgaccgataaagatggctattgtgccccgaatcaggaaatggtgcgtcagtatgcccgcaccattgcaaaagaatgggaacgcctgcgtggtaatctgattctgattgttggcggcggcagctatggtaatgcagttccggttcgctatcatctgaaagatgccagtctgccgtggaaagataccgatctgagcatgatgaccgtgaaaatgttcgaatggctgagtctggttacccagatattccgcgaagaaggcgttccgtgttatccgttccagaccagcggctatgtggtgaccaaaaataaacgcccgcagcgcttcttcgttgaaccggtggaacatgtgctgagtatgggtgttctgccggtgttcagtggtgatctggtgttcgatgaagaacagcagttcattatcttcagtagcgataatctgccggaactgttcgtggaacgcatgagtctgcgccgtatggtgatgctgaccgatgtggaaggtgtgatgcagattggtaccgatggccagcagaccgttattccggaagttacccgtgccaacttccaggaagttctgcgttgtgccggcccgagtcagaaaccggatattaccggtggcatgaaaaataaactggaagccctgctgcgcctggcagaacagggtgttgaaggtgttattaccagtggtcgtaaagcagaagccctgttaccggcactgttcgaaccggaaccggtgggtaccatgattcgtccgtgggcccaggaaaatcgtggcggcctgctgtgactgaaagctt

SEQ ID NO: 279 - protein, 259 aa, methanogenic archaeon
MILIKFGGSVITDKAEYRKFNKETVARLADEIKRSGQEVIIVHGAGSFGHVVSKQYNLQKGYENDSQIPAMARVMCDTRELSSMVVEELLAKNIPAVSVPIGSCFVADGGKLVVDNEEPLRRLTDLGIMPVMFGDVITDRKTRFCIVSGDQVMELLCWMYNPEKVVFVSDIDGLYDRNPKTDKAARMIGTVTKEKMASIATDSNVDDVTGGVRNKMEAMLRMTDGSRKCYLVNGNAPNRLYSLLKGETVTCTIAKGGLE

SEQ ID NO: 280 - DNA, 780 bp, methanogenic archaeon
atgatactcataaaattcggcggaagcgtaattaccgacaaggccgagtatcgcaaattcaacaaggagaccgtcgccagactggctgacgaaatcaaacgctccggacaggaggtcatcatcgtccacggagcaggttctttcggacacgtggtctccaaacaatacaaccttcagaagggttacgagaacgattcccagattcccgccatggcaagggtcatgtgcgacaccagggaactcagctccatggtcgtggaggaactcctcgccaagaatatccccgccgtatcggtgcccatcggatcctgtttcgtcgcggacggaggcaaactggtggtcgacaacgaggagcccctcaggaggctcaccgacctcgggatcatgcctgtcatgttcggagatgtgattaccgacaggaagacccgtttctgcatagtttctggcgaccaggttatggagctcctgtgctggatgtacaatcccgagaaagtcgtgttcgtatcggacatcgacggactctacgaccgcaaccccaagacagacaaggccgcacgcatgatcggcaccgtcaccaaggagaagatggcgagtatcgccaccgattccaacgtggatgacgtcacaggtggggtgcgcaacaagatggaggccatgctccgcatgaccgacggcagcaggaaatgctacctggtcaacggcaacgcccccaaccgcctgtactcgctgctgaagggcgagacagtcacatgcacaatcgcaaaaggaggcctggaatga

SEQ ID NO: 281 - DNA, 790 bp, Artificial sequence
  Codon optimised sequence
atgatcctgattaagttcggcggcagtgttattaccgataaagcagaatatcgcaaattcaataaggaaaccgttgcccgcctggcagatgaaattaaacgcagcggccaggaagtgattattgttcatggtgccggtagcttcggccatgttgtgagtaaacagtataatctgcaaaaaggctatgaaaatgacagccagattccggccatggcacgcgtgatgtgtgatacccgtgaactgagtagtatggttgttgaagaactgctggcaaaaaatattccggcagtgagcgtgccgattggcagctgcttcgttgcagatggtggtaaactggttgtggataatgaagaaccgctgcgtcgtctgaccgatctgggtattatgccggtgatgttcggcgatgtgattaccgatcgcaaaaccagattctgtattgtgagtggcgatcaggtgatggaactgctgtgctggatgtataatccggaaaaagtggtgttcgttagcgatattgatggtctgtatgatcgcaatccgaaaaccgataaagccgcccgtatgattggtaccgtgaccaaagaaaaaatggccagcattgccaccgatagtaatgtggatgatgttaccggtggcgtgcgtaataaaatggaagcaatgctgcgtatgaccgatggtagtcgcaaatgctatctggttaatggtaatgcaccgaatcgcctgtatagtctgctgaaaggcgaaaccgttacctgtaccattgcaaaaggcggcctggaatgactgaaagctt

SEQ ID NO: 282 - protein, 260 aa, Thermoplasmatales archaeon
MFIIKLGGSVITDKSKENFYKQVIVDNLVKAIKKANKKTIIIHGAGSFGHIIADKYKLNDGYNSDDQLLGFSLTHGMVQKLSSLVLESFHKNGIPAVAVPPHSNLILNNHTPLSFDYKIFKEYIDMNFTPITFGDVVIDKKLGFSICSGDLLMLLLAKNLKPEKTIFVIDEDGLYTSNPKKDNNAELIESATKEQLNKYVTSMDKHADVTGGMQGKIETIKKIADIGIDTILLNGNKPDRLFKVLNGEKTKSTIITGGYK

SEQ ID NO: 283 - DNA, 783 bp, Thermoplasmatales archaeon
atgtttattatcaaacttggcggtagtgtaattacagataaatcaaaggaaaatttctacaaacaggtaattgttgataatctagtaaaggctattaaaaaggcaaacaaaaaaacaataattattcatggggcaggttcttttgggcatattattgcagataaatacaaattaaatgatggttataattcagatgatcaactgcttggtttttctcttactcatggtatggtacaaaaattaagcagtttggtcttggaatcttttcataaaaatgggatacctgctgttgctgttcctcctcactctaatttaatattaaacaatcatactcctttaagctttgattataaaattttcaaagaatatattgatatgaactttactccaataacttttggagatgttgtaattgataaaaaattgggtttttcaatttgttcaggcgatcttttaatgctcctacttgcaaaaaatctcaaacctgaaaagacaatctttgtaattgatgaggatggcctttatacctctaatccaaaaaaagataataatgcagaactaatagaatctgcaacaaaagaacaattaaataaatatgttacctcaatggacaagcatgcagatgtaactggaggaatgcaaggaaaaattgaaacaattaaaaaaattgcagatattggtattgatacaatcctgctaaatggtaataaacctgatagattattcaaggtcttaaatggagaaaaaacaaaatcaacaataatcactggaggatataaatga

SEQ ID NO: 284 - DNA, 793 bp, Artificial sequence
  Codon optimised sequence
atgttcatcatcaagctgggcggcagcgttattaccgataaaagtaaagaaaacttctacaagcaggtgattgtggataatctggttaaagccattaaaaaagccaataaaaagaccattatcatccatggtgccggtagcttcggtcatattattgccgataaatataagctgaacgatggctataatagtgatgatcagctgctgggcttcagcctgacccatggtatggttcagaaactgagtagtctggttctggaatcattccataaaaatggcattccggcagttgccgttccgccgcatagtaatctgattctgaataatcataccccgctgagcttcgattataaaatcttcaaagaatacatcgacatgaacttcaccccgattaccttcggcgatgttgttattgataaaaaactgggcttcagtatctgtagcggtgatctgctgatgctgctgctggcaaaaaatctgaaaccggaaaaaaccatcttcgtgattgatgaagatggtctgtataccagcaatccgaaaaaagataataacgccgaactgattgaaagcgcaaccaaagaacagctgaataaatatgtgaccagcatggataaacatgccgatgtgaccggtggtatgcagggtaaaattgaaaccattaaaaagatcgcagacattggtattgataccattctgctgaatggtaataaaccggatcgcctgttcaaagtgctgaatggcgaaaaaaccaaaagtaccattattaccggcggttataaatgactgaaagctt

SEQ ID NO: 285 - protein, 247 aa, Thermoplasmatales archaeon
MVIVLKLGGSIITEKDSYRKINEDAIVKLFDVLSKSREKMVLIHGAGSFGHILALKHGLEKPGPSKGREASISRVMSDVLALDSAIVDKLNEKGVRGVAVPPHAIYHGSLPDFKIVETLLANGFIPVLYGDIIVYRGKYRIISGDEIALDLSRRFRPRSVVFVTDVDGLYDSDPKVNKRAKFIPKIRASEIEVIDTKRDATGSMAGKMERIKKIVHYTGRVIIINGKRPDRLSDSLEGKETKSTVIT

SEQ ID NO: 286 - DNA, 744 bp, Thermoplasmatales archaeon
atggtgattgttttaaaactcggtggaagcatcataactgaaaaagacagttacaggaagatcaacgaagacgccatagtaaaattgtttgatgttctctctaaaagcagggagaaaatggtgctcatccacggtgcgggatccttcggccacatacttgcactcaaacatggtcttgaaaaacctggaccatcaaaggggagggaggcatcgatctcaagggttatgagtgacgtccttgcactcgattctgcaatcgtagataagctcaacgagaagggtgtcagaggagtggcagtaccaccacacgcaatctaccatgggagtttgcccgatttcaagatagttgaaacgctcctggccaacggattcattcctgtgctttacggagacataattgtctataggggaaaatacaggataatctcaggggacgagatagctctggatttatcaagaaggttcaggccaaggtcagttgtctttgtcactgacgtcgacggactttatgattccgacccgaaggtcaacaagagggctaaatttatcccaaagatcagggcaagtgagatcgaagtgatagacactaaaagagatgctactggttccatggcggggaagatggaaagaattaagaaaatagtacactatacaggcagagtgataataatcaacggaaagagacctgacaggcttagtgattccctggaggggaaggagacgaagtccacggtgatcacatga

SEQ ID NO: 287 - DNA, 754 bp, Artificial sequence
  Codon optimised sequence
atggttatcgttctgaaactgggcggtagcattattaccgaaaaagatagttatcgcaagattaatgaggatgccattgtgaaactgttcgatgtgctgagcaaaagtcgtgaaaaaatggtgctgattcatggcgcaggtagcttcggtcatattctggccctgaaacatggtctggaaaaaccgggcccgagtaaaggtcgtgaagcaagtattagtcgtgttatgagcgatgtgctggcactggatagcgcaattgtggataaactgaatgaaaaaggcgttcgtggcgttgccgtgccgccgcatgccatctatcatggtagcctgccggacttcaaaattgttgaaaccttactggcaaatggcttcattccggttctgtatggcgatattattgtgtatcgtggcaaatatcgtattattagcggcgatgaaattgcactggatctgagtcgccgcttccgcccgcgtagtgtggtgttcgttaccgatgtggatggtctgtatgatagtgatccgaaagtgaataaacgtgccaaattcattccgaaaattcgcgccagcgaaattgaagtgattgataccaaacgtgatgcaaccggtagtatggccggtaaaatggaacgtattaaaaaaattgtgcactacaccggccgcgtgattattattaatggtaaacgcccggatcgcctgagcgatagcctggaaggtaaagaaaccaaaagtaccgtgattacctgactgaaagctt

SEQ ID NO: 288 - protein, 270 aa, Odinarchaeota archaeon
MNNKLTIIKLGGSVITDKSVPFSIDEKVIKNIISEMEQIKKEKTIIVHGGGAFGHPIAKKYMLATGLKVKEQIRGVIETSQAMLTLNKIILDMFIQADYPVISFSPHDIFITKHGRIYKTFLNSLKNVLEIGFIPVLFGDVVYDTAQGVAILSGDQIISYLSIKLKASKVILGTDINGIYSSDPKINPGAQLIPEVTPDNYRRILKILKSNTKNSLDVTGGMYGKVRELIKVAKHGIDIYILNARTPGNISKILNNSEINCTQFKNWRKQ

SEQ ID NO: 289 - DNA, 813 bp, Odinarchaeota archaeon
ttgaataataaattaactataattaaactcggcggaagtgtgatcacagataaaagtgtcccgttctcaatagatgagaaagtgattaagaatattatcagtgaaatggagcagattaaaaaagaaaaaacgattatagttcacggcggcggagcgttcgggcaccctatcgccaaaaaatacatgctagcaacaggtcttaaagttaaagagcagataagaggcgtaatcgaaacaagtcaagcgatgcttacactgaataaaatcatactcgatatgtttattcaagcagattacccggttatctctttcagcccacatgatattttcatcactaaacacggtagaatatataaaacatttcttaattctctaaaaaatgttttagaaataggcttcatacctgttttattcggcgacgttgtatatgatacagcccaaggtgttgcgatactttcaggggaccagattataagctatttatcaatcaagcttaaagctagtaaggtgattctcggaacagatataaatggaatatactcaagcgatcctaaaataaaccccggcgcgcagttaatcccagaagtaactcctgataactatcgcaggattctaaaaattttaaagtcaaacactaaaaacagtttagatgtcacaggtggaatgtacggtaaggttagagagctgataaaggtcgctaaacatggaatagacatatatattttgaacgctagaacaccaggtaatattagtaaaatattaaataactctgaaattaattgtacacaattcaaaaactggcgtaaacagtaa

SEQ ID NO: 290 - DNA, 823 bp, Artificial sequence
  Codon optimised sequence
atgaacaacaagctgaccattattaagctgggcggcagcgttattaccgataaaagcgtgccgttcagcattgatgaaaaagttattaaaaacatcatcagcgagatggaacagattaaaaaagaaaaaaccatcatcgtgcacggcggtggcgcattcggtcatccgattgcaaaaaaatatatgctggcaaccggcctgaaagtgaaagaacagattcgtggcgttattgaaaccagtcaggccatgctgaccctgaataaaattattctggatatgttcatccaggccgattatccggttattagcttcagcccgcatgatatcttcattaccaaacatggccgtatctataaaaccttcctgaatagcctgaaaaatgttctggaaattggcttcattccggttctgttcggcgatgttgtgtatgataccgcacagggtgttgccattctgagcggtgatcagattattagctatctgagcattaaactgaaggcaagtaaagttattctgggcaccgatattaatggcatctatagcagcgatccgaaaattaatccgggtgcccagctgattccggaagtgaccccggataattatcgccgcattctgaaaattctgaaaagtaataccaagaacagcctggatgtgaccggcggcatgtatggtaaagttcgtgaactgattaaagttgcaaaacatggtattgatatctacattctgaacgcccgtaccccgggcaatattagcaaaattctgaataatagcgagatcaattgcacccagttcaaaaattggcgcaaacagtgactgaaagctt

SEQ ID NO: 291 - protein, 137 aa, Shigella flexneri
MPMDLRDNKQSQKKWKNRTLTSSLEFALTGIFTAFKEERNMKKHAVSALLAVIAGLVFKVSVIEWLFLLLSIFLVITFEIVNSAIENVVDLASDYHFSMLAKNAKDMAAGAVLVISGFAALTGLIIFLLKIWFLLFH

SEQ ID NO: 292 - DNA, 414 bp, Shigella flexneri
atgcctatggacttaagagataataagcaaagccaaaagaaatggaaaaatagaactttaacttccagccttgaattcgctttaacggggatttttacggcttttaaagaagagcgtaatatgaaaaaacatgcagtgtcagctcttttagctgtcattgctggtttggtttttaaagtatcagtcattgagtggctttttcttttattaagtatttttttggttattacctttgaaattgtcaattcggctattgaaaatgtggttgatttggccagtgactatcatttttccatgttggctaaaaatgctaaggatatggctgcaggagctgttcttgtcatttcaggttttgctgccttgacaggcttgattatttttttattaaaaatttggtttttgctttttcattaa

SEQ ID NO: 293 - DNA, 424 bp, Artificial sequence
  Codon optimised sequence
atgccgatggatctgcgtgataataaacagagtcagaaaaaatggaagaaccgcaccctgaccagtagcctggagttcgccctgaccggtatcttcaccgcattcaaagaagaacgcaatatgaaaaaacacgcagttagtgcactgctggcagtgattgcaggtctggtgttcaaagttagcgttattgaatggctgttcctgctgctgagcatcttcctggttattaccttcgaaattgttaatagcgccattgaaaatgtggtggatctggcaagtgattatcacttcagcatgctggcaaaaaatgccaaagatatggcagccggcgcagttctggttattagtggcttcgcagccctgaccggcctgattatcttcctgctgaaaatctggttcctgctgttccattgactgaaagctt

SEQ ID NO: 294 - protein, 123 aa, Roizmanbacteria bacterium
MIRGHRISIRHAIDGIIWAVRTQPNYRIHFTLSILSLVGGLIFKISYEEFLAIYVLIFVGLAIETVNTSLEKTSDAITREYNHDIKTAKDVAAGAMLFFAIGALAVACAIFIPKIWLLFINAS

SEQ ID NO: 295 - DNA, 372 bp, Roizmanbacteria bacterium
atgattcgtggacacagaatttctattagacatgcaattgacggcataatctgggccgttcggacacagcctaactatcggattcattttactttatcaattctgtctctggttggtggcctgattttcaaaatttcctatgaagaatttttagcaatctacgtcctgatttttgtggggctggcaattgagacagtcaatacttcacttgagaaaacttcagacgccatcacccgtgaatacaatcacgatatcaaaaccgccaaagatgtggcggccggagcaatgcttttttttgcgattggtgctttggccgtggcctgcgcgatctttatccccaaaatatggctgttatttattaacgcgtcttaa

SEQ ID NO: 296 - DNA, 382 bp, Artificial sequence
  Codon optimised sequence
atgatccgtggtcatcgtattagcattcgccatgcaattgatggcattatctgggcagtgcgtacccagccgaattatcgcattcacttcaccctgagcattctgagcctggttggtggcctgatcttcaaaattagttatgaagagttcctggccatctatgttctgatcttcgtgggcctggcaattgaaaccgtgaataccagtctggaaaaaaccagcgatgccattacccgtgaatataatcatgatattaagaccgcaaaggatgttgccgcaggtgccatgctgttcttcgccattggcgccctggcagttgcatgcgccatcttcattccgaaaatctggctgctgttcattaatgcaagctgactgaaagctt

SEQ ID NO: 297 - protein, 127 aa, Bacteroidales bacterium
MESGNRLGLHSRYQSIRFAVNGIKTLFREEKNAVIQLLIFAMVIIAGFFSRLSDTEWILITTVSMFVFACECFNTALEDLSDFVTGEKNEKIRKIKDLAAGGVLISALGAAITGMIIFFPRFLDLFN

SEQ ID NO: 298 - DNA, 384 bp, Bacteroidales bacterium
atggaatccggtaacaggttgggtttgcatagccggtatcagagtatcaggtttgctgtaaatggcataaaaactctcttcagagaagagaaaaatgcggtaattcagttgctgatttttgctatggtaatcatagcgggatttttttccagactgtcagatacagaatggattttaataacaacagtaagtatgtttgtatttgcttgtgaatgttttaatactgcactggaagatctttctgatttcgtgaccggagaaaagaatgaaaagatcaggaagatcaaggacctggcagcgggtggagtcctgatctcagctttaggtgctgctattacaggtatgataattttttttccacgatttttagacctgtttaattga

SEQ ID NO: 299 - DNA, 394 bp, Artificial sequence
  Codon optimised sequence
atggaaagtggtaatcgtctgggtctgcatagtcgttatcagagtattcgcttcgcagttaatggtattaaaaccttattccgtgaagaaaaaaacgccgttattcagctgctgatcttcgcaatggttattattgcaggcttcttcagtcgcctgagcgataccgaatggattctgattaccaccgtgagcatgttcgtgttcgcatgtgaatgcttcaataccgccctggaagacttaagcgacttcgtgaccggtgaaaaaaatgaaaaaattcgtaagatcaaggacctggcagccggtggtgtgctgattagcgccctgggtgcagccattaccggcatgattatcttcttcccgcgcttcctggatctgttcaattgactgaaagctt

SEQ ID NO: 300 - protein, 168 aa, Methylomirabilis oxyfera
MEGSSHPFRCALKGVEDAISTQRHLRAHIVVAGFVALFGLLLELPHVDLVLLLMAIALVIITELLNTAVELTVDLVSPTFHPIAGRAKDIAAGAVLIAALVAATVGIIVLAPPLFGALTTRPLSAKSALLVATTLGLVGSIIAALLPRSSSSKRDQLLTVSKKLNTDH

SEQ ID NO: 301 - DNA, 507 bp, Methylomirabilis oxyfera
gtggaaggctcgtcacatccgtttcgctgtgcgttgaaaggggtcgaagacgcgatctccacacaacgccacctgcgcgctcacatcgtcgtggccgggttcgtcgcgctgttcgggctgttgctggagttgccgcatgtcgatctggtgctgctgctcatggccattgcgcttgttatcatcacagaactgctgaatactgcagtggagttgaccgtggatcttgtatcgccgacctttcacccgatcgccggacgggcaaaggacattgccgccggcgcggtgctgatcgccgcgttggttgcggctaccgtcggtattatcgtacttgcgccccctttgttcggcgcgctcaccacacgtccgctttcagcgaagtcagctctgctggtggcgaccaccctcgggctggtcggaagcattattgctgcactcttgccacgttcttccagctcgaagcgcgaccagcttttaactgtcagcaagaagttgaatactgaccactga

SEQ ID NO: 302 - DNA, 517 bp, Artificial sequence
  Codon optimised sequence
atggaaggcagcagccatccgttccgttgtgccctgaaaggcgttgaagatgcaattagcacccagcgtcatctgcgcgcccatattgttgttgccggcttcgtggccctgttcggcctgctgctggaactgccgcatgtggatctggttctgctgctgatggcaattgccctggttattattaccgaactgctgaataccgcagttgaactgaccgtggatctggtgagcccgaccttccatccgattgccggtcgcgcaaaagatattgccgccggcgccgtgctgattgcagcactggtggccgccaccgttggtattattgtgctggcaccgccgctgttcggtgcactgaccacccgcccgctgagtgccaaaagtgcactgctggttgcaaccaccctgggcctggttggcagtattattgcagcattactgccgcgtagcagcagtagcaaacgtgatcagctgctgaccgttagtaaaaaactgaataccgatcattgactgaaagctt

SEQ ID NO: 303 - protein, 132 aa, Eremococcus coleocola
MDLKDRKDLNPFKRWLLSCGFALEGLRFTWKGEPNFKIHISILILVTIAGFFFGIARWEWVTLLICFAFILTLELINTALETLVNWIADKQWHPLAKITKDVAAGAVLVGAIIVAGIGLIIFVPYIWQYFLG

SEQ ID NO: 304 - DNA, 399 bp, Eremococcus coleocola
atggacttgaaagatagaaaagatttaaatccctttaaacggtggctactttcctgtggctttgccctagagggattacgctttacttggaaaggtgagcccaattttaagattcatatttccattttgattcttgtaacgattgctgggtttttctttgggattgcccgctgggaatgggtgactcttttaatttgttttgcctttattttgaccttagagttaatcaataccgccttagaaactctcgtaaactggatagctgataaacagtggcaccctttggctaagattaccaaggatgtggcagctggagctgtcttagtgggtgctattattgttgcggggattggtttgattatttttgtgccatatatctggcaatattttctaggttag

SEQ ID NO: 305 - DNA, 409 bp, Artificial sequence
  Codon optimised sequence
atggatctgaaagatcgtaaagacttaaatccgttcaaacgctggctgctgagctgcggcttcgcactggaaggtctgcgcttcacctggaaaggcgaaccgaacttcaaaattcatattagtatcctgatcctggttaccattgccggcttcttcttcggcattgcccgctgggaatgggtgaccctgctgatctgcttcgccttcattctgaccctggaactgattaataccgcactggaaaccttagtgaattggattgcagataaacagtggcatccgctggcaaaaattaccaaagatgtggccgcaggtgccgttctggttggtgccattattgtggcaggtattggcctgattatcttcgttccgtatatctggcagtacttcctgggttgactgaaagctt

SEQ ID NO: 306 - protein, 128 aa, Firmicutes bacterium
MLSRTKKRRKFKDSFKNCIDGLRFININEDNFKREILLGIITLVLSYLLKIDKIEFIIIIIVIGLVLVSEIINTAIERLVDLVSPKYNKLAGEVKDIAASSVLLMCIFSLVVGVIIFVPKIINLLGGF

SEQ ID NO: 307 - DNA, 387 bp, Firmicutes bacterium
atgctttcacgaactaagaaaagacggaagtttaaagatagttttaagaattgtatagatggcttaagatttattaatattaatgaagataattttaaaagagaaatacttttaggtattataactttagttttatcgtatcttcttaagatagataaaatagaatttataatcataattatagtaattggactagtattagtaagtgaaataattaatacagcaatagaaagattagttgatcttgttagtccaaaatataataagttagcaggagaagtaaaagatatagcagcttcttctgtccttcttatgtgtatcttttctttagtagtaggagtaataatatttgtaccaaaaataattaatttactaggaggattttaa

SEQ ID NO: 308 - DNA, 397 bp, Artificial sequence
  Codon optimised sequence
atgctgagtcgtaccaaaaaacgtcgcaaattcaaagatagcttcaaaaattgtatcgacggcctgcgcttcattaatattaatgaagataacttcaagcgtgagattctgctgggtattattaccctggtgctgagctatctgctgaaaattgataaaattgagttcatcatcatcatcattgtgattggcctggtgctggtgagcgaaattattaataccgcaattgaacgtctggtggatctggttagcccgaaatataataaactggccggcgaagttaaagatattgccgccagcagcgtgctgctgatgtgcatcttcagcctggtggtgggcgtgattatcttcgtgccgaaaattattaatctgctgggtggcttctgactgaaagctt

SEQ ID NO: 309 - protein, 156 aa, Raphidiopsis brookii
MFPKSSIPPTPPKRLPKIVSSEREFSWQIASNLLASFKYAWAGISYGFQTQRNFRIHVAACAFVIGLSIFLHLKPVEIAIISITSGLVLTLELVNTAIESLVDLTVKQTYHELAKVAKDCAAGAVLVSAMVSLIVATTLLLPPLLRLITTTFLLEW

SEQ ID NO: 310 - DNA, 471 bp, Raphidiopsis brookii
atgttccctaagagttcaataccaccaacaccaccaaagcgtttaccaaaaattgtatcttcggaaagggaattttcttggcaaatagcttctaacttacttgccagctttaaatacgcttgggctggtatcagttatggttttcagacccagcgtaactttaggattcatgtagctgcttgtgcttttgtgattggtttgagtatttttctgcatcttaaaccagtagaaatagccataattagcattacaagtggtttagttttaacattggagttagttaatacagccattgagtctctggtggatttaactgttaagcagacctatcatgaattggcgaaagtggccaaagactgtgctgctggtgctgtgcttgtctcagcaatggtatcactaatagtagcaactacactattacttcctcctttactacgtttaatcacaactacattcttattagaatggtag

SEQ ID NO: 311 - DNA, 481 bp, Artificial sequence
  Codon optimised sequence
atgttcccgaaaagtagcattccgccgaccccgccgaaacgtctgccgaaaattgtgagtagcgaacgtgagttcagttggcagattgcaagcaatctgctggcatcattcaaatatgcctgggccggcattagctatggcttccagacccagcgtaacttccgtattcatgtggccgcatgcgcattcgttattggtctgagtatcttcctgcatctgaaaccggttgaaattgcaattattagcattaccagcggtctggttctgaccctggaactggttaataccgcaattgaaagcctggtggatctgaccgtgaaacagacctatcatgaactggcaaaagttgccaaagattgtgcagcaggtgcagtgctggttagtgccatggttagtctgattgttgcaaccaccctgctgctgccgccgctgctgcgtctgattaccaccaccttcctgctggaatggtgactgaaagctt

SEQ ID NO: 312 - protein, 128 aa, Bacterium species
METVRKFLMGFVYAWHGIKRALSQRNMKFHAFVAAMVVLFGFFLQISFVEWVVVIVLIALVFAAEMFNTAIENEANTMRDKLGAPYSLMGAPKDLAAGAVLVLAIAAAIIGLAIFLPKLWVLFQEITM

SEQ ID NO: 313 - DNA, 387 bp, Bacterium species
atggagactgtaagaaagtttttaatgggttttgtatacgcctggcatggaataaaacgggctttaagtcagcgaaatatgaagtttcacgcttttgttgcggcgatggtggttctttttggctttttccttcaaatatcatttgtggaatgggttgtggtcatagttttgattgccctagtttttgctgccgaaatgtttaacaccgcgattgaaaacgaggccaatactatgcgcgataagcttggcgcgccgtactcgttgatgggtgcccctaaagacttagctgccggtgcggttttagttttagcaattgccgctgcaataattggccttgcgatttttctgcccaaactttgggttctttttcaagaaatcacaatgtag

SEQ ID NO: 314 - DNA, 397 bp, Artificial sequence
  Codon optimised sequence
atggaaaccgtgcgtaaattcctgatgggcttcgtgtatgcatggcatggcattaaacgtgccctgagccagcgtaatatgaaattccatgccttcgttgcagcaatggtggtgctgttcggcttcttcctgcaaattagcttcgttgaatgggttgtggtgattgtgctgattgccctggtgttcgccgccgaaatgttcaataccgccattgaaaatgaagccaataccatgcgtgataaactgggcgccccgtatagcctgatgggtgccccgaaagacttagcagcaggcgcagttctggttctggccattgcagcagccattattggcctggccatcttcctgccgaaactgtgggttctgttccaggaaattaccatgtgactgaaagctt

SEQ ID NO: 315 - protein, 120 aa, Saprospirales bacterium
MKKWDFIGLRFALSGLFILLQQRNFRIEALVALLAIVLGFYLQINAQAWLWISLAITLVLVGEAINTAIELTLDRIGRDFHPTTKRAKDIAAGAVVLCCLHAAIIGFVVFGPKLWALLFA

SEQ ID NO: 316 - DNA, 363 bp, Saprospirales bacterium
atgaaaaaatgggactttatcggcctccgatttgcccttagtggcctttttattcttttacaacagcgaaactttcgcattgaagcactggttgcacttcttgcaattgttttggggttttatcttcaaattaacgcgcaggcctggctatggattagccttgccattactctcgttcttgtaggagaagccatcaataccgctattgagttaaccttagatagaataggaagggatttccatccgacaacaaaacgagctaaagacattgccgcaggagcagttgttttatgttgtctccatgctgctattattggatttgtagtctttggccctaagctttgggcattgctctttgcataa

SEQ ID NO: 317 - DNA, 373 bp, Artificial sequence
  Codon optimised sequence
atgaagaagtgggacttcattggtctgcgcttcgcactgagtggtctgttcattctgctgcaacagcgcaacttccgtattgaagcactggtggccctgctggccattgttctgggcttctatctgcaaattaatgcccaggcctggctgtggattagcctggccattaccctggtgctggttggtgaagccattaataccgcaattgaactgaccctggatcgtattggtcgcgacttccatccgaccaccaaacgcgccaaagatattgcagcaggcgcagtggtgctgtgctgtctgcatgcagcaattattggcttcgttgtgttcggtccgaaactgtgggccctgctgttcgcatgactgaaagctt

SEQ ID NO: 318 - protein, 114 aa, Staphylococcus aureus
MKRFKYALDGLKILIQKDYKFLLHVFAMIVAIVFGLVLNINRIEWIFILIAIALVLTVEALNTAIEYVVDLVTVEYHDLAKYAKDIAAFSVLIVSILAFIIGLIVFLPHFIALF

SEQ ID NO: 319 - DNA, 345 bp, Staphylococcus aureus
atgaaaaggtttaaatatgcacttgatgggctgaaaatcttaattcaaaaagactataaatttcttttacatgtgtttgcaatgattgttgctattgtctttggtctcgtactaaatattaatcggattgagtggatatttatactcattgctattgcattagttctcactgttgaagctttaaacactgctattgaatatgttgtcgatttagtgaccgttgaatatcatgatttagctaaatacgctaaagatattgcggcttttagtgtacttatagtttcaatattagcatttattataggtttaatagtatttttaccacattttatagcgttattttag

SEQ ID NO: 320 - DNA, 355 bp, Artificial sequence
  Codon optimised sequence
atgaagcgcttcaaatatgccctggatggcctgaaaattctgattcagaaagattataagttcctgctgcatgtgttcgcaatgattgttgcaattgtgttcggcctggtgctgaatattaatcgcattgaatggatcttcatcctgattgccattgccctggttctgaccgtggaagccctgaataccgcaattgaatatgtggttgatctggttaccgttgaatatcatgatctggccaaatatgcaaaagatattgccgcattcagcgttctgattgttagcattctggccttcattattggcctgattgtgttcctgccgcacttcattgcactgttctgactgaaagctt

SEQ ID NO: 321 - protein, 117 aa, Sphingobacteriaceae bacterium
MGYFKNRINAFGYAFSGIYQAFRQETHLKIHAVIALLVIGLAAFFEVCNEHWILLLLAITLVIALEMLNSAVEKLCNIIKPELDPRIKYIKDVSAGAVLIVCLFAVAAGIIVFSHYF

SEQ ID NO: 322 - DNA, 354 bp, Sphingobacteriaceae bacterium
atgggctactttaagaatagaataaatgcttttggctacgcattttcaggcatttaccaagcttttcggcaggaaacgcatcttaagatacatgccgtaattgcccttttagtgatcggactcgctgctttttttgaagtctgtaacgaacattggatcctactacttttagctatcacattggtgattgccctagagatgctaaattcagccgttgagaagctctgcaatattattaagcctgaacttgatccaagaattaaatatattaaagacgtttctgccggcgcggttcttatagtttgtttgtttgctgttgctgccggaataattgttttttcacattatttttga

SEQ ID NO: 323 - DNA, 364 bp, Artificial sequence
  Codon optimised sequence
atgggttacttcaaaaaccgtattaacgccttcggctatgccttcagtggtatctatcaggcattccgccaggaaacacatctgaaaattcatgcagtgattgccctgctggttattggcctggccgcattcttcgaagtgtgcaatgaacattggattctgctgctgctggccattaccctggttattgcactggaaatgctgaatagtgcagttgaaaaactgtgtaatatcattaagccggaactggaccctcgtattaaatatattaaagatgtgagcgcaggcgcagtgctgattgtgtgtctgttcgccgtggccgcaggtattattgtgttcagtcattacttctgactgaaagctt

SEQ ID NO: 324 - protein, 248 aa, Clostridium species
MKEKKKESKEITNHNFIDAWKNAFNGIIYATTTQKNIQKQLIIAVIVVIVSLFFNLNRAEFLCFLFTIVLIIFAEMVNTAIETVVDLYVDVYHPKAKIAKDVAAGGVVITTINAIIVAYFLFFDKIADIGLTFLKNVTTNPMHLAFSIMIIAIIAVLALIAYAKTNKHKGLNKKMVPSGHATIGFAANTLIWLLTDNIVILMLSLLTAILLAESRIAAKEHTLSEIIFSGCFATILVLILYGIAMAIV

SEQ ID NO: 325 - DNA, 747 bp, Clostridium species
atgaaagaaaaaaagaaggaaagcaaagaaataacaaaccacaattttatagatgcgtggaaaaatgcatttaatggaataatatatgcaacaacaactcaaaaaaacatacaaaaacaattaattattgcagtaattgttgttattgttagcttgttttttaatttgaatcgtgctgaatttctatgctttctattcacaattgttctaataatatttgctgaaatggttaatacagcaatagaaacagttgttgatttatatgttgatgtatatcatccaaaagctaaaatagcaaaagatgttgcagcaggaggagtagtaattacaacaataaatgcaataattgtggcatatttcttattttttgataaaattgcggatataggactaacatttttgaaaaatgtaacaacaaatcctatgcatttagctttttctattatgattattgctataattgcagttttagcattaattgcttatgcaaaaacaaacaaacataaaggattaaacaaaaaaatggttccaagtggtcatgcaactattggctttgcagctaatactcttatatggcttttaactgataatatagttattttaatgttgtcattattaactgcaattttattagcagaaagtagaatagcagcaaaagaacatacattgtcagaaataatatttagtggttgttttgcaacaatattagtattaatattatatggaattgcaatggcaatagtttaa

SEQ ID NO: 326 - DNA, 757 bp, Artificial sequence
  Codon optimised sequence
atgaaggaaaagaagaaggaaagcaaagaaattaccaatcataacttcatcgacgcctggaaaaatgcattcaatggcattatctatgccaccaccacccagaaaaatattcagaaacagctgattatcgccgttattgtggttattgtgagtctgttcttcaatctgaatcgcgcagagttcctgtgcttcctgttcaccattgtgctgattatcttcgcagaaatggttaataccgcaattgaaaccgttgttgatctgtatgtggatgtgtatcatccgaaagccaaaattgccaaagatgttgcagcaggtggcgttgttattaccaccattaatgccattattgttgcctacttcctgttcttcgataaaattgcagatattggtctgaccttcctgaaaaatgtgaccaccaatccgatgcatctggccttcagcattatgattattgcaattattgcggtgctggccctgattgcctatgcaaaaaccaataaacataagggcctgaataaaaaaatggttccgagtggccatgccaccattggcttcgcagcaaataccctgatctggctgctgaccgataatattgtgattctgatgctgagcctgctgaccgcaattctgctggccgaaagtcgtattgcagccaaagaacataccctgagcgaaattatcttcagcggctgcttcgccaccattctggttctgattctgtatggcattgcaatggccattgtgtgactgaaagctt

SEQ ID NO: 327 - protein, 295 aa, Unknown
  Obtained from metagenome sequencing
MTNAATSSGLTVSVRHPAAGLARRNLLGVSRTNPGLRGGRANPWNLNRIIPAEESMEVLASSTVLAGCAQVIDRLRADPPAVHAITSPVAAERTANTLLALGIRPSLTVNPDEVAAFVAVSDALLVNLGMLDPVREAAIDRAVAEAARQARPWVLDPVFAEVSPARAALTRALLARGPAALKANAQEAGLAADAPITTVAIVTGAEDRLRLGARNIGIANGHPLAASVTAMGCALGALVAACLCRADDPLRLSPTASPPNRRQPEQAAAESEGPGSFAVAFYDCPAIDRGETIVK

SEQ ID NO: 328 - skipped

SEQ ID NO: 329 - DNA, 894 bp, Artificial sequence
  Codon optimised sequence
atgaccaatgccgccaccagcagcggtctgaccgttagcgtgcgtcatccggccgcaggtctggcacgtcgtaatctgctgggcgttagtcgtaccaatccgggtctgcgcggtggtcgtgcaaatccgtggaatctgaatcgcattattccggcagaagaaagtatggaagttctggcaagcagcaccgtgctggcaggctgcgcacaggtgattgatcgtctgcgtgcagatccgccggccgtgcatgcaattaccagcccggttgccgcagaacgcaccgccaataccctgctggccctgggtattcgtccgagtctgaccgtgaatccggatgaagttgcagccttcgttgccgtgagcgatgccctgctggttaatctgggtatgctggaccctgttcgcgaagcagccattgatcgtgccgtggccgaagcagcccgccaggcaagaccgtgggttctggaccctgtgttcgcagaagttagtccggcccgtgccgccctgacccgtgcattactggcacgcggtccggcagcactgaaagccaatgcccaggaagccggcctggccgcagatgctccgattaccaccgttgcaattgttaccggcgccgaagatcgtctgcgcctgggtgcccgtaatattggtattgcaaatggtcatccgctggcagcaagcgttaccgcaatgggttgtgcactgggcgccctggttgccgcatgtctgtgtcgcgccgatgatccgctgcgcctgagtccgaccgccagccctcctaatcgccgccagccggaacaggccgccgcagagtcagaaggcccgggtagcttcgccgttgccttctatgattgtccggccattgatcgcggcgaaaccattgttaaataaggatcc

SEQ ID NO: 330 - protein, 227 aa, Unknown
  Obtained from metagenome sequencing
MDAVRRRLSRSRRRAQPAGMGRHAAALRQAAGGARPRPLRPLRRLHGRGGADPAGAGGRGDRGGTAVSDSDGMIMSDSALDTAAGLLERLRTRRPRVHCLMNTVVQKLVADGLSALGAIPSMTSSREEVAAFVRKADALCVNLGTLDAARREAINLALEAASEAGRPWALDPAHCDYSPPRAAFAQELLARGPAVLRANPAEHVLLAVPADIVGVVTVLDRDRALPK

SEQ ID NO: 331 - skipped

SEQ ID NO: 332 - DNA, 690 bp, Artificial sequence
  Codon optimised sequence
atggatgcagtgcgccgtcgtctgagccgcagtcgccgtcgtgcacagccggctggtatgggccgccatgcagccgctctgcgccaggcagcaggtggtgcacgtccgcgtccgctgcgtcctctgcgtcgtctgcatggtcgtggcggtgccgatccggcaggtgcaggtggtcgcggtgatcgtggtggtaccgccgtgagcgatagtgatggcatgattatgagtgatagcgcactggataccgccgcaggtctgctggaacgtctgcgtacccgccgcccgcgtgttcattgcctgatgaataccgttgtgcagaaactggttgcagatggtctgagcgcactgggtgcaattccgagtatgaccagcagccgtgaagaagtggcagcattcgttcgcaaagcagatgcactgtgcgtgaatctgggcaccctggatgccgcacgtcgtgaagcaattaatctggccctggaagcagcaagtgaagcaggccgtccgtgggcactggaccctgctcattgcgattatagcccgccgcgcgccgccttcgcacaggagttactggcacgtggcccggccgttctgcgcgcaaatccggctgaacatgtgctgctggcagtgccggccgatattgtgggcgttgttaccgtgctggatcgcgatcgtgccctgccgaaataaggatcc

SEQ ID NO: 333 - protein, 288 aa, Unknown
  Obtained from metagenome sequencing
MSQPFDVLRAWRILQRVREQNPLIHCVTNQVVMNFTANVLYAVGASPLMSQAPEEADELAKARANLLVNIGTLTRAWLVDVREVVRAEQSLGRGRPRAVLDPVGAGFTHFRTEAAHELLKTGVFGTLRANAFEVMKLAGVAARGQGVDSNESSLEAAGAAGQLARKYGIVVAVSGVVDYVTDGRREIWLRTGHPLLTRVTGTGCALNAVIAAATAVDDDPLDAAAAALAIFGTAALKAARNPEGEPGPGSFAAGFLDELARLEHSDLEAFWQVEQTSSSSPDPMESAR

SEQ ID NO: 334 - skipped

SEQ ID NO: 335 - DNA, 873 bp, Artificial sequence
  Codon optimised sequence
atgagtcagccgttcgatgtgctgcgcgcctggcgcattctgcaacgtgttcgtgaacagaatccgctgattcattgtgtgaccaatcaggttgtgatgaacttcaccgccaatgtgctgtatgccgttggtgcaagtccgctgatgagccaggcaccggaagaagccgatgaactggccaaagcacgtgccaatctgctggttaatattggtaccctgacccgtgcctggctggtggatgttcgtgaagttgttcgcgccgaacagagtctgggccgtggccgtccgcgtgctgtgttagatccggtgggtgccggcttcacccacttccgtaccgaagccgcccatgaactgctgaaaaccggcgtgttcggcaccctgcgtgccaatgcattcgaagtgatgaaactggccggtgttgccgcccgcggtcagggtgttgatagcaatgaaagcagcctggaagccgccggtgcagcaggtcagctggcacgtaaatatggcattgttgttgccgttagcggtgtggttgattatgttaccgatggtcgtcgcgaaatctggctgcgcaccggccatccgctgctgacccgtgtgaccggtaccggttgcgcactgaatgcagtgattgcagcagcaaccgcagtggatgatgatccgctggatgcagcagccgccgcactggcaatcttcggcaccgcagcactgaaagcagcccgtaatccggaaggtgaaccgggcccgggcagcttcgcagctggcttcctggatgaactggcacgtctggaacatagtgatctggaagcattctggcaggttgaacagaccagcagtagtagcccggaccctatggaaagtgcccgctaaggatcc

SEQ ID NO: 336 - protein, 223 aa, Unknown
  Obtained from metagenome sequencing
MFFKQKTAYEISLRLVGSEMCIRDSLTPAALDAMRLAGREANRCGVPVVLDPVGAGATPYRTEAARQLLEDINVAIVRGNSGEVAAIIGQQAVVRGVESLETALPAAELGAQAAQQLGVVVALTGARDIISDGSVSLAVDHGSPWLKTIDQPTQPRKAAVACFAAVAPSSLQAAAAALAAYGLAAELAHKPQIHGPASFKVALLDAVYGLTAETLQRAKVSVL

SEQ ID NO: 337 - skipped

SEQ ID NO: 338 - DNA, 678 bp, Artificial sequence
  Codon optimised sequence
atgttcttcaagcagaaaaccgcatacgaaattagtctgcgcctggttggtagcgaaatgtgtattcgtgatagtctgaccccggcagcactggatgcaatgcgtctggccggtcgtgaagccaatcgttgtggtgttccggtggtgctggaccctgttggcgccggtgcaaccccgtatcgtaccgaagcagcacgccagctgctggaagatattaatgtggcaattgttcgtggtaatagtggtgaagtggcagcaattattggccagcaggccgtggtgcgtggtgttgaaagtctggaaaccgccctgccggccgcagaactgggtgctcaggccgctcagcagctgggcgttgttgttgccctgaccggtgcacgtgatattattagcgatggcagcgttagcctggccgttgatcatggtagtccgtggctgaaaaccattgatcagccgacccagccgcgcaaagcagcagttgcctgcttcgccgcagtggccccgagtagcctgcaagcagccgccgctgccctggcagcttatggtctggccgcagaattagcacataaaccgcagattcatggcccggccagcttcaaagtggccctgctggatgcagtgtatggtctgaccgccgaaaccttacagcgcgccaaagttagcgttctgtaaggatcc

SEQ ID NO: 339 - protein, 234 aa, Unknown
  Obtained from metagenome sequencing
MEAPFEPEPDHAGVGSLQGVVLPLPSASSRRAEGEMQDPGLYLQRMCEAAPLVQNITNFVAMTIMANVLLAVGASPAMVHAREEAAEFAGLAQALTVNIGTPDPAWADAMAEAAAVIKAAGRPWVLDPVGVGATRFRQEIAARLLDLGPSVIRGNASEILALAGLGGTGRGADAADSVAAVSYTHLTLPTTRGAVVAASGAVDFVTDGSRAFRVANGHPPVYYTHLRAHETKTA

SEQ ID NO: 340 - skipped

SEQ ID NO: 341 - DNA, 711 bp, Artificial sequence
  Codon optimised sequence
atggaagccccgttcgaaccggaaccggatcatgcaggtgtgggcagtctgcaaggcgtggttctgccgctgccgagtgccagtagccgccgtgctgaaggtgaaatgcaggaccctggtctgtatctgcaacgcatgtgtgaagccgcaccgctggttcagaatattaccaacttcgtggccatgaccattatggcaaatgttctgctggccgttggtgccagcccggccatggttcatgcccgcgaagaagcagcagagttcgccggtctggcccaggccctgaccgtgaatattggcaccccggaccctgcatgggccgatgcaatggccgaagcagcagcagtgattaaagcagccggtcgtccgtgggttctggaccctgtgggtgtgggtgcaacccgcttccgtcaggaaattgcagcccgtctgctggatctgggtccgagtgtgattcgcggtaatgccagtgaaattctggcactggccggcctgggcggcaccggtcgtggtgcagatgcagccgatagtgtggcagccgttagctatacccatctgaccctgccgaccacccgcggcgctgttgttgccgctagtggtgccgttgacttcgtgaccgatggtagccgtgcattccgtgtggccaatggtcatccgccggtgtattatacccatcttcgtgcccatgaaaccaaaaccgcataaggatcc

SEQ ID NO: 342 - protein, 271 aa, Unknown
  Obtained from metagenome sequencing
MGLSGSSNRPSPSRRQCPGIMTRGGTVTDHDDRSRLARDTTRVLARLRAERPRVHCLTNKRQMQLTANLLLAAGAVPSMTMDAREMPAFVETSRALLVNLGMLDPWREAAIPVAIEAAHGLGRPWVLDPVKVDRAPGRRAFASSLLERGPAVLRCNAAEAEMLEPGPGIVTAVTGAADRISGGGREIGLGGGTALMDRVTAMGCAASALVAACLAVEPDPFLATVSGLLVMKVAGAIAAESAAGPGSFVPLFLDAVHGLDAATLQRRAELA

SEQ ID NO: 343 - skipped

SEQ ID NO: 344 - DNA, 822 bp, Artificial sequence
  Codon optimised sequence
atgggcctgagtggcagcagcaatcgcccgagtccgagtcgccgccagtgccctggtattatgacccgtggcggtaccgttaccgatcatgatgatcgcagtcgcctggcacgcgataccacccgtgtgctggcacgtctgcgtgccgaacgtccgcgcgttcattgtctgaccaataaacgtcagatgcagctgaccgccaatctgctgctggccgcaggtgccgtgccgtcaatgaccatggatgcacgtgaaatgccggccttcgttgaaaccagtcgcgcactgctggttaatctgggtatgctggacccttggcgtgaagccgcaattccggttgccattgaagccgcacatggtctgggtcgtccgtgggttctggaccctgttaaagtggatcgtgccccgggccgtcgtgccttcgcttcaagtctgctggaacgcggcccggccgtgctgagatgcaatgcagccgaagcagaaatgctggaaccgggcccgggcattgttaccgcagttaccggtgccgcagatcgtattagtggtggtggccgcgaaattggtctgggcggtggtaccgccctgatggatcgcgtgaccgcaatgggctgcgccgcaagtgccctggtggcagcttgtctggcagtggaaccggacccgttcctggccaccgttagcggcctgctggtgatgaaagttgcaggcgcaattgccgcagaaagcgcagccggtccgggtagcttcgttccgctgttcctggatgcagtgcatggcctggatgcagcaaccctgcaacgtcgtgccgaactggcataaggatcc

SEQ ID NO: 345 - protein, 264 aa, Unknown
  Obtained from metagenome sequencing
MKAAEAIWQSLSAVRAEAPLVHNITNFVVMNPTASKALAVGASPVMVHAAEEVEQMTAMARALVVNLGTLSPPWATAMRLAVARAGTAGTPWVLDPVGVGALAWRTGIAAELIRQQPAAVRGNGSEILALAGAAGAAGKGVDSRHDSAAAVDIARGLARATGAVVAITGRVDYVTDGERQVAIANGHPLMARVTGLGCTATALVGAFCAVEADRLAATAHAPAMPSTARAWAAERAAGPGSLQVGLLDALYTLDLDTIRQRERI

SEQ ID NO: 346 - skipped

SEQ ID NO: 347 - DNA, 801 bp, Artificial sequence
  Codon optimised sequence
atgaaggcagcagaagccatctggcagagtctgagcgccgttcgtgccgaagccccgctggttcataatattaccaacttcgtggttatgaatccgaccgccagcaaagcactggcagtgggtgccagtccggtgatggttcatgccgcagaagaagtggaacagatgaccgcaatggcacgtgcactggttgttaatctgggcaccctgagcccgccgtgggccaccgcaatgcgtctggctgtggcacgtgcaggcaccgccggtaccccttgggttctggaccctgtgggtgtgggtgcactggcatggcgtaccggtattgcagcagaactgattcgccagcagccggcagcagtgcgtggtaatggtagcgaaattctggccctggcaggcgccgcaggcgcagcaggtaaaggtgtggatagtcgtcatgatagcgcagcagccgttgatattgcccgcggtctggcacgcgccaccggtgcagttgttgccattaccggccgcgtggattatgttaccgatggcgaacgccaggttgcaattgcaaatggtcatccgctgatggcccgcgttaccggtctgggctgcaccgctaccgcactggttggtgcattctgtgcagttgaagcagatcgcctggcagccaccgcccatgcaccggcaatgccgagcaccgcccgcgcatgggctgctgaacgcgcagcaggtccgggcagtctgcaagttggtctgctggatgcactgtataccctggatctggataccattcgccagcgcgaacgcatttaaggatcc

SEQ ID NO: 348 - protein, 268 aa, Unknown
  Obtained from metagenome sequencing
MQEPTAPLRQFVSPAELVSAAAAVLARVRAKSPRVHCITNSVAENFTANVLLALGAVPSMTLSPIEIGAFVGRADALLVNLGTFGRERREATSIAVDTAVQGGLPWVLDPVFVDRAPPRATYAQDLLFMGPTAMRLNAAEFAALAGAGDELDDVRGYARERGIAIGLSGARDLIADGRRAASIANGDAMMARITAMGCAASAMVGACLAVEKDAFVATAAALLIVGVAGEMAAETARGPGSFAVAILDALYSIDGDALAARARISLHE

SEQ ID NO: 349 - DNA, 804 bp, Unknown
  Obtained from metagenome sequencing
atgcaggaaccgacagccccattgcgccagttcgtatcgcccgcggagcttgtctccgcggcggccgccgtgctcgcgcgggtgcgcgcgaaatcgccccgtgtccactgcatcaccaattcggtggcggagaatttcaccgccaatgtgctgctggcgctgggcgccgttccctccatgactttgtcgcccatcgagatcggggcctttgtgggccgtgccgatgcgctgctggtcaatctcggtaccttcggccgcgagcggcgcgaggcgacgtcgatcgcggtcgatacggcggtgcagggcgggctgccttgggttctcgatccggtctttgtcgaccgcgcaccgccgcgcgcgacctacgcccaggatctgttgtttatgggcccgacggcgatgcggctcaacgcggccgagtttgccgcgctggccggcgccggcgatgagctcgacgatgtgcgcggctacgcacgcgagcgcggcatcgcgatcggcctgtcgggcgcgcgcgacctgatcgcggacggccgccgcgccgcgtcgatcgccaatggcgatgcgatgatggcgcggatcacggcgatgggctgcgccgcctcggcgatggtcggcgcctgcctcgcggtcgagaaggacgccttcgtcgccaccgcagcggcgctgctgatcgtcggcgttgccggcgagatggcggcggaaaccgcgcgcggccccggcagcttcgcggtggcgatcctcgatgcgctctattccatcgacggcgacgcgctcgcggcgcgggcccgcatttccctgcacgag

SEQ ID NO: 350 - DNA, 813 bp, Artificial sequence
  Codon optimised sequence
atgcaggaaccgaccgccccgctgcgtcagttcgttagcccggccgaactggttagcgccgcagccgctgtgctggcccgtgttcgtgccaaaagcccgcgcgttcattgtattaccaatagcgtggccgaaaacttcaccgcaaatgtgctgctggccctgggtgccgttccgagtatgaccctgagcccgattgaaattggtgccttcgttggtcgtgccgatgcactgctggttaatctgggcaccttcggtcgtgaacgccgcgaagcaaccagtattgcagtggataccgccgtgcagggtggcctgccgtgggttctggaccctgtgttcgttgatcgtgccccgccgcgcgcaacctatgcccaagacttactgttcatgggtccgaccgccatgcgcctgaatgccgcagagttcgcagccctggccggcgcaggtgatgaactggatgatgtgcgcggttatgcccgcgaacgtggcattgcaattggtctgagcggtgcacgcgatctgattgccgatggtcgtcgtgcagccagcattgccaatggcgatgcaatgatggcacgtattaccgccatgggctgcgccgccagcgccatggttggcgcatgtctggccgttgaaaaagatgccttcgttgccaccgcagcagccctgctgattgttggtgttgccggcgaaatggccgcagaaaccgcacgcggtccgggcagcttcgcagtggcaattctggatgcactgtatagcattgatggcgatgccctggcagcccgtgcccgtattagtctgcatgaataaggatcc

SEQ ID NO: 351 - protein, 269 aa, Unknown
  Obtained from metagenome sequencing
MIDAKSLAADLAAIREKNPLVLSVTNNVVTNTTANALLALGASPAMSHAQEEMEELPAFAGAIVLNIGTPAREYVEAMIRAAATASRLNIPIILDPVAAGVTRHRNRVLKNLLDDFPMAIIRGNASEIMALAGEAATAKGADSAHGSSEAVDAAMRLARERKTVVCVSGEQDQITDGARLIRVSGGHVMMTKVTGLGCTASAVAGAYAAVNRDYLAAAAHAAATMKIAGELAADISAGPGSLQLHFYDALYALTPETIAARLRLEEVVS

SEQ ID NO: 352 - skipped

SEQ ID NO: 353 - DNA, 816 bp, Artificial sequence
  Codon optimised sequence
atgatcgatgccaaaagtctggcagcagacttagcagccattcgtgaaaaaaatccgctggttctgagcgtgaccaataatgtggtgaccaataccaccgcaaatgcactgctggcactgggtgccagtccggcaatgagccatgcccaggaagaaatggaagaactgccggcattcgccggcgcaattgtgctgaatattggcaccccggcccgtgaatatgttgaagccatgattcgtgcagccgcaaccgcaagccgcctgaatattccgattattctggaccctgtggcagcaggcgttacccgccatcgtaatcgtgttctgaaaaatctgctggatgacttcccgatggccattattcgtggcaatgccagcgaaattatggccctggcaggtgaagcagccaccgccaaaggtgccgatagtgcacatggtagtagtgaagccgttgatgccgccatgcgcctggcacgtgaacgcaaaaccgtggtgtgcgtgagcggtgaacaggatcagattaccgatggcgcacgcctgattcgtgtgagtggcggccatgttatgatgaccaaagttaccggtctgggttgtaccgcaagcgcagttgcaggtgcatacgctgccgttaatcgtgattatctggcagcagccgcacatgccgcagcaaccatgaaaattgcaggtgaactggccgcagatattagcgcaggcccgggcagtctgcaactgcacttctatgatgccctgtatgcactgaccccggaaaccattgcagcccgtctgcgtctggaagaagtggtgagctaaggatcc

SEQ ID NO: 354 - protein, 198 aa, Unknown
  Obtained from metagenome sequencing
MSAIRERRPLVHNITNFVVMNNSANALLALGASPAMVHSSDEVEDFVALSQALVVNIGTLYSEQIAAGKLAAIRAKAAGIPWVFDPVGAGATPYRQAAAVALARLGPSAIRGNGSEILALAQQARAGQGVDSLHGSEAALDAARKLAEDSSAAIAITGEVDYVTDGRRVVEIHNGHALMTRVTGLGCSATAIIGAFLA

SEQ ID NO: 355 - skipped

SEQ ID NO: 356 - DNA, 603 bp, Artificial sequence
  Codon optimised sequence
atgagcgccattcgtgaacgccgtccgctggtgcataatattaccaacttcgtggttatgaataacagtgcaaatgccctgctggcactgggcgcaagtccggcaatggttcatagcagcgatgaagtggaagacttcgttgcactgagccaggcactggtggtgaatattggtaccctgtatagcgaacagattgccgcaggcaaactggcagcaattcgcgcaaaagccgcaggtattccgtgggtgttcgatccggttggtgccggtgcaaccccgtatcgccaggccgcagccgtggctctggcccgtcttggtccgagtgccattcgtggcaatggtagtgaaattctggcactggcccagcaggcccgtgcaggtcagggtgtggatagcctgcatggcagtgaagcagccctggatgccgcacgcaaactggccgaagatagcagtgccgccattgcaattaccggcgaagtggattatgttaccgatggtcgtcgtgttgttgaaattcataatggccatgcactgatgacccgtgtgaccggcctgggttgtagcgccaccgccattattggcgccttcctggcctaaggatcc

SEQ ID NO: 357 - protein, 264 aa, Unknown
  Obtained from metagenome sequencing
MALHAVAQEYRQQSPLVFCLTNTVVANFTANALLASGASPAMTDLPGEAGPFAKAASAVLVNLGTPSTEQLAAMEEAVQSASAAGTPWILDPVAVGALPVRTDFARRIARQRPALIRGNASEILALAGRQSASRGVDALDDVSAALAAGRELAERHDCVVAISGQSDAIIDATRTVLVHTNGIGLTRITGGGCALGAFCAGMIAVHDDPFEAAIAAHGFYGLAAEKALENSTGPGSFAVAFIDALSATDPEELKTLKHEELNHA

SEQ ID NO: 358 - DNA, 792 bp, Unknown
  Obtained from metagenome sequencing
atggctttgcatgcagttgcccaagaataccggcaacaatcacctttggttttctgcctgaccaacaccgtcgtagcaaatttcaccgccaatgccctgctggcatccggcgcgtccccggccatgacggatctgcccggagaggccggccccttcgcaaaggcggcttccgccgtcttggtgaatctgggaactccgagcaccgagcagctggccgccatggaagaagccgtgcaatcggcgagcgcagcaggcaccccatggatccttgatccggtggcggtcggcgccctgccggtgcgcacggatttcgcgcggcgcattgcccggcaacgcccggccctgattcgcggcaacgcctcggaaatcctggccctggccggacggcaatcggcttcacgcggtgtagatgccttggatgacgtctctgccgccttggcggctggacgcgagctggccgagcggcatgactgcgtggtggccatttccggccagtccgatgccatcatcgatgccacgcggacggtcctggtgcacaccaacggaatcggcttgacgcggatcaccggcggcggttgcgcgttgggcgcgttctgcgccggcatgattgcggtccacgatgacccgttcgaggccgccatcgcggcccacggcttctacgggctggccgctgaaaaggccctggagaacagcacaggtccgggcagcttcgccgtcgcattcattgatgcgctgtccgcaaccgatccagaagaacttaagactttgaagcacgaggaactgaaccatgca

SEQ ID NO: 359 - DNA, 801 bp, Artificial sequence
  Codon optimised sequence
atggccctgcatgcagtggcacaggaatatcgtcagcagagcccgctggtgttctgtctgaccaataccgtggttgccaacttcaccgcaaatgccctgctggcaagcggtgcaagtccggccatgaccgatctgccgggcgaagcaggcccgttcgcaaaagccgccagcgcagtgctggttaatctgggcaccccgagcaccgaacagctggccgctatggaagaagccgtgcagagcgccagcgccgcaggtacaccgtggattctggaccctgttgccgtgggcgccctgcctgtgcgtaccgacttcgcacgtcgtattgcacgccagcgtccggccctgattcgcggtaatgcaagcgaaattctggcactggccggtcgccagagcgccagtcgtggtgtggatgccctggatgatgtgagtgcagcactggcagcaggtcgtgaactggccgaacgtcatgattgcgttgttgcaattagtggtcagagcgatgcaattattgatgcaacccgtaccgttctggtgcataccaatggcattggtctgacccgtattaccggcggtggttgtgcactgggtgcattctgtgccggtatgattgcagtgcatgatgatccgttcgaagccgcaattgcagcccatggcttctatggtctggcagcagaaaaagccctggaaaatagtaccggcccgggtagcttcgccgttgcattcattgatgcactgagcgccaccgatccggaagaactgaaaaccttaaaacatgaagaactgaatcacgcataaggatcc

SEQ ID NO: 360 - protein, 256 aa, Unknown
  Obtained from metagenome sequencing
MQARDDDVRSAAAEVLERLRARRPRVHCITNAVAQAFTANLLLAVGAVPSMTISPEEVGDFVARADALLVNLGTLEKSRRAAIGIAVDTANGEHVPWLVDPVFVDRSPLRASFAQALILLRPHAVRLNGDEFAALAGAEGATEAVSHFARDNRTVIALTGEIDTVGDGKRMARVANGHPWMGKITAMGCAGAALAAACLAVESEPWLAVAAGQIIVGVAGEVAAEQARGPGSLAVAILDTLNSLDRATLMARAKVT

SEQ ID NO: 361 - DNA, 768 bp, Unknown
  Obtained from metagenome sequencing
atgcaagcgcgtgacgatgatgtcagaagcgcggctgccgaagtcctcgaacggttgcgggcgcggcgccctcgggtccactgcatcacgaatgcggtcgcgcaggcctttacggcaaatcttctgcttgccgttggcgcggttccatcgatgaccatttcgccggaagaggtcggcgatttcgtcgcgcgtgccgatgcgctgctcgtcaatctcggcacgctggaaaagtcgcggcgtgccgcgatcggaatcgctgtggacactgcaaacggggagcatgttccgtggctggtcgatccggtgttcgttgaccgctcgccattacgcgccagtttcgcgcaggccctgatcctgttgcggccgcatgcggtgcggctgaacggcgacgaattcgctgcgctcgctggagccgaaggcgcgactgaagcggtctcgcatttcgcccgcgacaaccgaacggtgatcgcgctcaccggagagatcgataccgtcggcgatggcaagcggatggcgcgggttgcaaacggccacccctggatgggcaagatcacggcaatgggctgcgccggcgcggcgttggcggcggcctgtcttgcggtagagagtgagccgtggctggcggtcgccgccggccagattatcgtcggtgtcgccggcgaggtggcggccgagcaggcgcgcggcccgggcagtctcgcggtggcgatcctggatacgttgaacagcctcgaccgggcgacgctgatggcgcgggcgaaggtgacg

SEQ ID NO: 362 - DNA, 777 bp, Artificial sequence
  Codon optimised sequence
atgcaggcacgtgatgatgatgttcgtagtgcagccgccgaagttctggaacgtctgcgtgcacgtcgtccgcgcgttcattgcattaccaatgccgttgcccaggccttcaccgccaatctgctgctggcagttggtgccgtgccgagcatgaccattagcccggaagaagtgggtgacttcgttgcccgcgccgatgcactgctggttaatctgggtaccctggaaaaaagtcgtcgcgccgccattggtattgcagttgataccgccaatggtgaacatgttccgtggctggttgatccggtgttcgtggatcgcagtccgctgcgcgccagcttcgcccaagcactgattctgctgcgcccgcatgcagtgcgcctgaatggtgatgagttcgccgcactggccggcgcagaaggcgcaacagaagccgttagtcacttcgcccgtgataatcgtaccgttattgccctgaccggcgaaattgataccgtgggtgatggtaaacgcatggcacgtgttgcaaatggccatccgtggatgggcaaaattaccgccatgggctgtgcaggtgcagccctggccgcagcttgcctggcagtggaaagcgaaccgtggctggcagtggcagccggccagattattgtgggcgtggccggcgaagttgcagcagaacaggcccgcggtccgggcagtctggctgttgcaattctggataccctgaatagcctggatcgcgccaccctgatggcacgcgccaaagtgacctaaggatcc

SEQ ID NO: 363 - protein, 239 aa, Unknown
  Obtained from metagenome sequencing
MEEEEEAGASLMTFPSSASPSSSSSRPAGPSEVSGADLLHERHLGAQRLERVQCLTNIVVAGWSANVLLAAGAAPAMVDNPREAGVLGGVAGGVLVNLGTPYEETVKAMYAAARAARAGRRPWVLDPVAAGALPWRTEHAVALLDEQPTVVRGNASEVLAPGEGEGGKGVDSTDSPESVLEAAQGLAERLGCVVAVSGAVDHVTDGRRLVRVHNGHEWLTKVTGVGCSLGALVAGYAAV

SEQ ID NO: 364 - skipped

SEQ ID NO: 365 - DNA, 726 bp, Artificial sequence
  Codon optimised sequence
atggaagaagaagaagaggccggtgcaagtctgatgaccttcccgagtagtgccagtccgagtagtagcagcagccgtccggcaggtccgagtgaagtgagtggcgcagacttactgcatgaacgtcatctgggtgcacagcgtctggaacgtgtgcagtgcctgaccaatattgttgttgcaggctggagcgccaatgtgctgctggccgcaggtgcagcaccggcaatggttgataatccgcgtgaagcaggtgtgctgggtggtgtggccggtggtgtgctggttaatctgggtaccccgtatgaagaaaccgtgaaagccatgtatgccgccgcacgtgccgcccgtgccggtcgtcgtccttgggttctggaccctgttgccgcaggcgcactgccgtggcgtaccgaacatgcagtggcactgctggatgaacagccgaccgttgttcgtggcaatgcaagcgaagtgctggccccgggcgaaggcgaaggcggtaaaggtgtggatagtaccgatagtccggaaagtgttctggaagcagcccagggtctggccgaacgcctgggttgtgtggttgcagttagcggtgccgtggatcatgttaccgatggccgccgtctggttcgcgttcataatggtcatgaatggctgaccaaagttaccggcgttggttgtagcctgggcgcactggttgccggttatgcagccgtgtaaggatcc

SEQ ID NO: 366 - protein, 296 aa, Unknown
  Obtained from metagenome sequencing
MRCPPSADPLRPLPWRTTTMHANPIDAAALWADLQAVRRQAPLVHNITNFVVMNYSANALLAVGASPVMAHAKEEVRDMVGIAQALVLNIGTLQPEWMEAMQLALAAARARGVPVVLDPVGAGATPYRNTAIAELLRCGAPSVVRGNASEVMSVAGLSAATRGVDSAAASGEALDAARALARGLQATVCISGADDHVVDAGARWATLSNGHPWMTRVTGVGCSASALVGAFCAVQPDRWRATVAAMAVLGVAGEMAAERTQAAGGSVGRLQIELLDGLQLLDEPSFAARLKLRTHD

SEQ ID NO: 367 - DNA, 888 bp, Unknown
  Obtained from metagenome sequencing
atgcgctgcccaccgtcggccgacccgctgcgcccactgccgtggaggacgacgacgatgcacgcgaaccccatcgacgctgcagccctgtgggccgatctgcaagccgtgcgccggcaagcgccgctggtgcacaacatcaccaacttcgtggtcatgaactacagcgccaatgcgctgctggccgtgggcgcgtcgccggtgatggcgcacgccaaggaagaagtgcgcgacatggtcggcatcgcgcaggcgctggtgctgaacatcggcacgctgcagcccgagtggatggaagcgatgcagctggcgctggccgccgcccgcgcgcgcggcgtgccggtggtgctggacccggtgggtgccggcgccacgccctaccgcaataccgccatcgccgagctgttgcgatgcggcgcgcccagcgtggtgcgcggcaacgcctcggaggtgatgagcgtggccggactgagcgcagcgacccgcggcgtcgacagcgccgccgcgtcgggcgaggcgctcgatgcagcgcgtgcgctggcgcgcggcctgcaagccaccgtgtgcatcagcggcgccgacgaccacgtggtcgatgccggcgctcgctgggccacgctgtccaacggccacccgtggatgacccgcgtcaccggcgtgggctgctcggccagtgcgctggtcggtgccttctgtgcggtgcagccggaccgctggcgcgccaccgttgcggccatggccgtgctgggtgtcgccggcgagatggcggccgagcgcacccaggccgccggcggcagtgtcggccggctgcagatcgagctgctcgacgggctgcagctgctcgacgaacccagcttcgccgcgcggctgaagctgcgcacccatgac

SEQ ID NO: 368 - DNA, 897 bp, Artificial sequence
  Codon optimised sequence
atgcgttgtccgccgagcgcagatccgctgcgccctcttccgtggcgtaccaccaccatgcatgccaatccgattgatgcagcagccctgtgggccgatctgcaagcagttcgccgccaggcaccgctggtgcataatattaccaacttcgttgttatgaactacagtgcaaatgcactgctggccgttggcgccagtccggttatggcacatgccaaagaagaagttcgcgatatggttggcattgcacaggccctggtgctgaatattggtaccctgcaaccggaatggatggaagcaatgcagctggcactggccgccgcccgtgctagaggtgttccggttgttctggaccctgtgggcgccggtgccaccccttatcgtaataccgcaattgccgaactgctgcgctgtggtgccccgagtgtggttcgcggcaatgcaagcgaagttatgagtgtggcaggtctgagtgcagcaacccgtggtgttgatagtgccgcagcaagcggcgaagccctggatgcagcccgtgcactggcacgtggcctgcaagcaaccgtgtgtattagcggcgcagatgatcatgtggtggatgcaggtgcccgctgggccaccctgagtaatggtcatccgtggatgacccgtgttaccggcgtgggttgcagtgcaagcgcactggttggtgcattctgtgcagttcagccggatcgctggcgcgccaccgtggcagcaatggcagttctgggcgtggcaggcgaaatggcagccgaacgcacccaggccgccggtggtagtgtgggtcgtctgcaaattgaactgctggatggtctgcaactgctggatgaaccgagcttcgccgcccgtctgaaactgcgtacccatgattaaggatcc

SEQ ID NO: 369 - protein, 225 aa, Unknown
  Obtained from metagenome sequencing
MGTLTPAALDAMRLAGREANRCGVPVVLDPVGAGATPYRTEAARQLLEDINVAIVRGNSGEVAAIIGQQAVVRGVESLETALPAAELGAQAAQQLGVVVALTGARDIISDGSVSLAVDHGSPWLKTITGSGCMASAAVACFAAVAPSSLQAAAAALAAYGLAAELAHKPQIHGPASFKVALLDAVYGLTAETLQRAKAVSYTHLTLPETKTDLVFRLLLEKKKLT

SEQ ID NO: 370 - skipped

SEQ ID NO: 371 - DNA, 684 bp, Artificial sequence
  Codon optimised sequence
atgggtaccctgaccccggcagcactggatgccatgcgcctggccggtcgtgaagcaaatcgttgtggtgtgccggtggtgctggaccctgtgggtgcaggcgcaaccccgtatcgcaccgaagcagcccgccagctgctggaagatattaatgttgccattgtgcgtggcaatagcggtgaagtggcagcaattattggccagcaggcagttgttcgtggtgtggaaagcctggaaaccgccctgccggcagccgaactgggtgctcaggccgcacagcagctgggcgtggtggtggctctgaccggcgctcgtgatattattagtgatggtagtgttagcctggcagtggatcatggtagtccgtggctgaaaaccattaccggtagcggctgtatggccagcgcagccgttgcctgcttcgccgcagtggcccctagtagcctgcaagcagccgcagccgcactggccgcatacggtctggcagccgaattagcacataaaccgcagattcatggtccggccagcttcaaagttgccctgctggatgccgtgtatggcctgaccgcagaaaccttacagcgtgccaaagcagttagctatacccatctgaccctgccggaaaccaaaaccgatctggtgttccgcctgctgctggaaaaaaaaaaactgacctaaggatcc

SEQ ID NO: 372 - protein, 193 aa, Unknown
  Obtained from metagenome sequencing
MIDEIEKSLYFLRKKKPIVLCLTNFVTMEFVANSLLSLGAAPITSVSEEELAELVQIASSVYINIGTLDDKFINLTKKAIELAQEFDKPIILDPVGAGATKVRTQTAKYILPFSSIIRGNASEIIALGQNAQLTYGVETSNTTDEAEEIATRIALENNTTIITSGPVDYITNGNHSVQVPFGSSLMQLVTGMG

SEQ ID NO: 373 - skipped

SEQ ID NO: 374 - DNA, 588 bp, Artificial sequence
  Codon optimised sequence
atgatcgatgaaatcgaaaagagtctgtacttcctgcgcaaaaaaaaaccgattgttctgtgcctgaccaacttcgtgaccatggagttcgtggccaatagcctgctgagcctgggtgccgcaccgattaccagtgtgagtgaagaagaactggcagaactggtgcagattgcaagtagtgtgtatattaatatcggcaccctggatgataaattcattaatctgaccaaaaaggccattgaactggcccaggagttcgataaaccgattattctggaccctgttggtgccggtgcaaccaaagtgcgtacccagaccgcaaaatatattctgccgttcagtagcattattcgcggcaatgcaagtgaaattattgcactgggccagaatgcacagctgacctatggtgttgaaaccagtaataccaccgatgaagcagaagaaattgcaacccgtattgccctggaaaataataccaccattattaccagcggcccggttgattatattaccaatggcaatcatagtgttcaggttccgttcggcagcagcctgatgcagctggttaccggcatgggttaaggatcc

SEQ ID NO: 375 - protein, 265 aa, Unknown
  Obtained from metagenome sequencing
MILDAAEVLERVRRDKPLVHHLTNLVTIYDCANIVKVFGASPVMAHAREEVADMAKIASALVLNIGTLTTEFVQAMLIAGKSANEKGIPVVFDVCGAGATKFRDDKCLEILDAVDISIIKGNSSEVARIAGEDVKTRGVDAADIEANLLEVAGSLAEKRECTVVITGKDDIVADRKRAVWVHNGHPMMANVVGTGCMAASVIGAFAAVEKDQLAASVSGLVCYEVAAEVAALVSAGPGSFKENLYDAVYNLDSGTIRSMQKIEFE

SEQ ID NO: 376 - skipped

SEQ ID NO: 377 - DNA, 804 bp, Artificial sequence
  Codon optimised sequence
atgatcctggatgcagcagaagtgctggaacgtgttcgccgtgataaaccgctggtgcatcatctgaccaatctggttaccatctatgattgtgccaatattgttaaagtgttcggcgcaagcccggtgatggcacatgcacgcgaagaagtggccgatatggcaaaaattgccagtgcactggtgctgaatattggtaccctgaccaccgagttcgttcaggccatgctgattgccggcaaaagtgcaaatgaaaaaggcattccggttgtgttcgatgtgtgtggtgccggtgccaccaaattccgtgatgataaatgcctggaaattctggatgccgtggatattagcattattaaaggtaatagcagcgaagtggcccgtattgccggtgaagatgtgaaaaccagaggtgtggatgccgccgatattgaagcaaatctgctggaagtggcaggcagcctggcagaaaaacgcgaatgtaccgttgttattaccggcaaagatgatattgttgcagatcgtaaacgcgccgtgtgggttcataatggccatccgatgatggcaaatgtggttggcaccggttgtatggcagcaagcgtgattggcgcattcgccgcagttgaaaaagatcagctggcagccagcgtgagcggcctggtgtgttatgaagttgccgccgaagttgcagccctggttagcgccggcccgggttcattcaaagaaaatctgtatgatgccgtgtataatctggatagtggcaccattcgcagcatgcagaaaattgagttcgaataaggatcc

SEQ ID NO: 378 - protein, 272 aa, Unknown
  Obtained from metagenome sequencing
MDAQTAAQHLSKVRDQNPLVHSITNNVVTNFTANGLLALGASPVMAYAIEEAADMAKIAGALVLNIGTLSSASVEAMIAAGKSANENGVPVIFDPVGAGATPFRTASARKIIQEVRLSVIRGNAAEIANIAGAPDWKIKGVDAGEAGGDVVQLAKTAASRMKTVIAITGKTDVISDGTDTYAVHNGDKLLTKVTGAGCLLTSVIGAFCAAEKDVLQAAVSAVSVYGSAAQLAALDTSHKGPGSFQIELLNKLASISEQEAAELAAIERVTEK

SEQ ID NO: 379 - DNA, 816 bp, Unknown
  Obtained from metagenome sequencing
atggacgcacaaaccgcagctcaacacttgagtaaagtgcgggatcaaaacccgctcgttcacagtatcaccaataatgtcgtcacgaacttcaccgctaacggactgctcgcgctcggcgcatcgcccgttatggcttatgcaattgaggaggccgccgacatggcgaaaatcgcaggagcgctcgtcctgaatataggcaccctcagttcggcgtcggttgaagctatgatcgcagccggaaaatcggccaatgaaaacggtgttccggtcatttttgatccggtaggcgccggcgccacgccgtttcggacggcatcagcccgcaagatcatacaggaggtccgcttgtccgtcattcgcggaaatgccgcggaaatcgccaatattgccggcgcccctgattggaagataaaaggcgtggatgcgggggaagccggaggagatgtggttcagctcgctaagacggctgcaagcaggatgaagacggtcattgcgattaccggaaaaaccgacgtcatctcggacggcaccgacacatacgccgtacataacggtgataaactgctgacgaaggtgacgggggcgggatgcctgctgacgtctgtaatcggagccttctgcgcagcggagaaggacgttctgcaagcggccgtttcagccgtttctgtatacggaagcgccgctcagcttgccgctctggacacctcccataaggggccgggcagcttccagattgagcttttaaacaagctggcaagcatctcagaacaagaagcggccgagcttgctgcaattgaaagggtgacagaaaaa

SEQ ID NO: 380 - DNA, 819 bp, Artificial sequence
  Codon optimised sequence
atggatgcacagaccgccgcccagcatctgagtaaagtgcgtgatcagaatccgctggttcatagcattaccaataatgttgtgaccaacttcaccgccaatggcctgctggcactgggtgcaagtccggtgatggcctatgccattgaagaagccgccgatatggcaaaaattgccggtgccctggtgctgaatattggtaccctgagcagcgccagtgttgaagccatgattgccgcaggcaaaagcgcaaatgaaaatggcgttccggttatcttcgatccggtgggcgcaggtgcaaccccgttccgtaccgcaagtgcccgtaaaattattcaggaagttcgtctgagcgtgattcgtggcaatgccgcagaaattgcaaatattgccggcgcaccggattggaaaattaaaggtgtggatgcaggtgaagcaggcggtgatgtggtgcagctggccaaaaccgcagccagccgtatgaaaaccgtgattgccattaccggtaaaaccgatgttattagtgatggcaccgatacctatgccgttcataatggcgataaactgctgaccaaagtgaccggtgccggttgcctgctgaccagcgttattggtgcattctgcgccgcagaaaaagatgttctgcaagcagccgttagcgcagtgagcgtgtatggtagcgcagcacagctggccgcactggataccagtcataaaggcccgggcagcttccagattgaactgctgaataaactggccagcattagtgaacaggaagcagccgaactggcagcaattgaacgtgttaccgaaaaataa

SEQ ID NO: 381 - protein, 249 aa, Unknown
  Obtained from metagenome sequencing
MHGNEIGDVSMDIAANALLALGASPAMIHAPEETDEFTAMADALVINVGTLSAQAAQGMERAAAAARLHGKPWLLDPVAAGLLTFRDDTIRKLLRHRPSLIRGNASEIMAVARIAGLTQDAAAPRGVDNRHQASDAEALAVKLARHCFCAVVATGAVDVVSDGETTVRIANGSPLAPRVTALGCSMSSVMGAYLALTGPFEAALATTILYGVAGDIAAEGARGPASFRTAFLDTLYSIARSELARRVRS

SEQ ID NO: 382 - skipped

SEQ ID NO: 383 - DNA, 750 bp, Artificial sequence
  Codon optimised sequence
atgcatggcaatgaaattggcgatgttagtatggatattgcagccaatgcactgctggcactgggtgccagtccggccatgattcatgccccggaagaaaccgatgagttcaccgccatggccgatgcactggttattaatgttggcaccctgagcgcccaggcagcccagggtatggaacgcgcagcagccgccgcacgcctgcatggtaaaccgtggctgctggaccctgttgcagcaggcctgctgaccttccgcgatgataccattcgtaaactgctgcgccatcgcccgagcctgattcgcggtaatgcaagtgaaattatggcagttgcacgcattgccggcctgacccaggatgcagcagcccctcgcggtgtggataatcgtcatcaggcaagtgatgccgaagccctggccgtgaaactggcacgtcattgcttctgtgcagttgtggccaccggcgccgttgatgttgttagtgatggtgaaaccaccgtgcgcattgcaaatggtagtccgctggccccgcgtgttaccgcactgggttgtagtatgagtagcgttatgggtgcctatctggccctgaccggcccgttcgaagccgctctggcaaccaccattctgtatggtgtggccggcgatattgccgcagaaggcgcccgtggcccggcatcattccgcacagcattcctggataccctgtatagcattgcccgtagtgaactggcacgccgtgttcgtagttaa

SEQ ID NO: 384 - protein, 221 aa, Unknown
  Obtained from metagenome sequencing
MIRDSDEAGVFAPVASAVLINLGTLGGRQPEAMREAARAARLAGTPWVLDPVAVGALPVRTALAAELLSARPTIVRGNASEIAAVAGAGAAGRGVDATQTVDAAAAPAVELATRLDAVVAVSGPVDLVTDGRTRIRVAGGHELLTRVTGAGCALGAVLGAFAAVADDPLTAAVAAHCVYAVAAEDAAAGSPGPGSFAVALLDSLAAVSADDVAARARLEVV

SEQ ID NO: 385 - skipped

SEQ ID NO: 386 - DNA, 666 bp, Artificial sequence
  Codon optimised sequence
atgatccgtgatagtgatgaagccggcgtgttcgcaccggttgcaagcgcagttctgattaatctgggtaccctgggtggccgccagccggaagctatgcgtgaagcagcacgcgccgcccgtctggcaggtacaccttgggttctggaccctgtggcagttggtgccctgccggttcgcaccgcactggcagctgaactgctgagcgcccgtccgaccattgtgcgtggtaatgcaagtgaaattgcagccgtggcaggcgcaggtgccgcaggtagaggtgttgatgccacccagaccgttgatgcagcagccgccccggccgttgaactggctacccgtctggatgccgttgtggcagttagtggtccggttgatctggtgaccgatggtcgcacccgtattcgcgtggcaggtggccatgaactgctgacccgcgttaccggcgccggctgtgcactgggtgccgttctgggtgccttcgcagcagttgccgatgatccgctgaccgccgccgttgccgcacattgcgtgtatgccgtggcagccgaagatgccgccgccggtagtccgggtccgggtagcttcgccgttgcactgctggatagtctggcagccgttagcgccgatgatgttgcagcccgcgcacgtctggaagttgtttaa

SEQ ID NO: 387 - protein, 205 aa, Unknown
  Obtained from metagenome sequencing
MPTPSVLFTRMRDTAPLVQCITNYVAMNVAANVLLAAGASPAMVHAEEEAGEFAALAGALTVNIGTLSPAWIGGMKAAVGGAASSGRPWVLDPVAHFATGLRRQAVAELLELRPTIIRGNASEIIALAGQATAGKGVDSGDSVAAAEAAARSLAAKHACTIAVTGPVDFVTDGARSARIEGGSPLMPLVTATGCALTALVGAFAA

SEQ ID NO: 388 - DNA, 615 bp, Unknown
  Obtained from metagenome sequencing
atgccgacaccttcggtgcttttcacgcggatgcgcgacaccgccccgctggtgcagtgcatcaccaactacgtggcgatgaatgtcgccgccaatgtgctgctggctgccggggcgtcgcccgccatggtgcatgccgaggaggaggcgggcgagttcgcagccctcgccggcgcgctgaccgtcaatatcggcacgctgtcgccggcctggatcggcggcatgaaggcggcggtcgggggcgcggcatcctccggccggccatgggtgctcgatccggtcgcgcatttcgcgaccggcctgcgccggcaggcggtcgcggagctgctggaactgcgcccgacgatcatccgcggcaacgcctccgagatcatcgccctcgccggtcaggccaccgccggcaagggggtcgattccggcgacagcgtcgccgccgccgaagccgccgcccgcagccttgccgccaagcatgcctgcaccatcgcggtgaccggcccggtcgatttcgtcaccgatggcgcccggtccgcccggatcgagggcggctcgcccctgatgccgctggtgaccgccaccggctgcgccctgaccgcgctggtcggcgccttcgccgcc

SEQ ID NO: 389 - DNA, 618 bp, Artificial sequence
  Codon optimised sequence
atgccgaccccgagcgtgctgttcacccgcatgcgcgataccgccccgctggttcagtgtattaccaattatgtggcaatgaatgtggccgcaaatgtgctgctggcagccggcgcaagcccggcaatggttcatgcagaagaagaagcaggtgagttcgccgcactggccggtgccctgaccgttaatattggcaccctgagcccggcatggattggcggcatgaaagccgcagttggcggtgcagcaagcagcggccgcccttgggttctggaccctgttgcacacttcgccaccggtctgcgccgccaggcagtggcagaactgctggaactgcgtccgaccattattcgcggcaatgccagtgaaattattgccctggccggccaggccaccgcaggtaaaggcgttgatagtggtgatagtgtggcagcagccgaagcagcagcccgcagcctggcagcaaaacatgcctgtaccattgcagtgaccggtccggttgacttcgtgaccgatggcgcacgtagcgcccgcattgaaggcggcagcccgctgatgccgctggttaccgcaaccggctgtgccctgaccgcactggtgggtgcattcgcagcataa

SEQ ID NO: 390 - protein, 283 aa, Unknown
  Obtained from metagenome sequencing
MREVPRGRRPLHAAGGREMSPATLLAALRAEPPLVQCITNYVAMNIAANVMLAAGASPAMVSDAEEAEEFAGIAGALTVNIGTLSAPFVEGMRAAIRGAQRAGRPWVLDPVACQATTYRRRVSAELVALRPTIIRGNASEVLSLAGEASRGQGVDGRDSVAAAEDGARRLAQASGAVVAVTGEVDFVTDGRRGARIEGGSPWMPLNTALGCSLTCLCGAYAAVGEDAFDAAVAALAHFAVAGRWAHEGAEGPGSFAPRFLDALRAVTPRALEAEAVIRGAEVV

SEQ ID NO: 391 - skipped

SEQ ID NO: 392 - DNA, 852 bp, Artificial sequence
  Codon optimised sequence
atgcgcgaagtgccgcgtggtcgccgccctcttcatgccgcaggtggtcgcgaaatgagcccggcaaccctgctggcagccctgcgtgcagaaccgccgctggtgcagtgtattaccaattatgtggcaatgaatatcgcagcaaatgtgatgctggcagcaggtgcaagtccggcaatggtgagcgatgccgaagaagccgaagagttcgcaggtattgccggcgccctgaccgttaatattggtaccctgagtgcaccgttcgtggaaggtatgcgtgcagccattcgcggcgcacagcgcgcaggtcgtccgtgggttctggaccctgttgcatgtcaggccaccacctatcgccgccgtgttagcgccgaactggttgccctgcgcccgaccattattcgcggtaatgccagtgaagttctgagtctggcaggcgaagcaagccgcggccagggtgtggatggccgtgatagcgtggccgcagccgaagatggtgcacgccgcctggcacaggccagcggtgcagttgttgcagttaccggtgaagttgacttcgtgaccgatggtcgtcgcggtgcccgcattgaaggcggcagtccgtggatgccgctgaataccgcactgggctgctctctgacctgtctgtgcggtgcctatgcagcagttggtgaagatgccttcgatgcagcagtggcagccctggcacacttcgcagtggccggtcgctgggcacatgaaggtgcagaaggcccgggcagcttcgcccctcgcttcttagatgcactgcgtgccgtgaccccgcgtgccttagaagcagaagccgtgattcgtggcgcagaagttgtgtaa

SEQ ID NO: 393 - protein, 261 aa, Unknown
  Obtained from metagenome sequencing
MQEPLKKIKETRPLIHHITNWVTIYDCANITRTFGALPVMAHAPEECADMTRISSALVLNIGTLTNELIDAMILSAKAANENKIPVVLDAVGVGATKFRDYMASKIIDSVHVDIIKGNYSEIAKLAGEKAQTKGVEATSINADPRQIARELAISKSCTIVMTGKEDIISNGKKIFVVRNGHELMGSIVGTGCMAASVIGSFAAVNTDHCDAAKDALCYFGIAGELAAEISRGPGSFKVNLYDETFDLSDERAEKMMNFEEY

SEQ ID NO: 394 - DNA, 783 bp, Unknown
  Obtained from metagenome sequencing
atgcaggaacctctaaaaaaaataaaggaaacaagaccactgatacaccatatcacaaattgggttactatatatgattgcgcgaatattacacgcacctttggtgctcttcctgtaatggcccatgcaccagaggaatgcgcggatatgacacgcatttcatctgctcttgtgcttaacataggcaccctgacaaatgagctgatcgatgcgatgatactttctgcgaaagccgcgaacgagaataagatacctgtcgtactcgatgcagttggcgtgggcgctacgaagttcagagattacatggcctcaaagatcatcgattcagttcatgtcgatatcatcaaagggaactattccgagatagcaaaacttgcaggcgaaaaagctcagacaaaaggtgtcgaggcaacttctatcaacgctgatcccagacagatagcaagagaacttgcaatatctaagtcctgcactatagtcatgacgggaaaagaggacataatcagcaatggtaaaaagatattcgttgtcaggaacggacatgagctaatggggtccattgtaggaacaggatgcatggccgcttcagttataggatctttcgctgctgtcaatacagaccattgtgatgctgcaaaagatgctctctgttattttgggatagcaggagaacttgcagctgagatatcgcgtggtcctgggagcttcaaggtaaatttatatgacgaaacatttgatctttctgatgaaagggcagaaaagatgatgaacttcgaagagtac

SEQ ID NO: 395 - DNA, 786 bp, Artificial sequence
  Codon optimised sequence
atgcaggaaccgctgaaaaaaattaaagaaaccagaccgctgattcatcatattaccaattgggtgaccatctatgattgcgccaatattacccgcaccttcggtgccctgccggttatggcccatgccccggaagaatgtgcagatatgacccgcattagcagcgcactggttctgaatattggcaccctgaccaatgaactgattgatgcaatgattctgagtgccaaagccgccaatgaaaataaaattccggtggttctggatgccgttggcgttggcgccaccaaattccgtgattatatggcaagcaaaattattgatagcgttcatgtggatatcattaaaggcaattatagtgaaatcgcaaagctggccggcgaaaaagcccagaccaaaggcgtggaagccaccagcattaatgccgatccgcgccagattgcccgcgaactggcaattagtaaaagttgtaccattgtgatgaccggtaaagaagatattattagtaacggcaaaaagatattcgtggttcgcaatggtcatgaactgatgggtagcattgttggcaccggttgtatggccgcaagtgttattggtagcttcgccgcagttaataccgatcattgcgatgccgccaaagatgcactgtgctacttcggcattgcaggcgaactggcagcagaaattagtcgtggcccgggtagcttcaaagttaatctgtatgatgaaaccttcgatctgagcgatgaacgcgccgaaaaaatgatgaacttcgaagaatattaa

SEQ ID NO: 396 - protein, 215 aa, Unknown
  Obtained from metagenome sequencing
MNDTANLTLHLGALPVMAQAAEEVAAMTRTADALLLNMGTLTPAALDAMRLAGREANRCGVPVVLDPVGAGATPYRTEAARQLLEDINVAIVRGNSGEVAAIIGQQAVVRGVESLETALPAAELGAQAAQQLGVVVALTGARDIISDGSVSLAVDHGSPWLKTITGSGCMASAAVACFAAVAPSSLQAAAAALAAYGLAAELAHKPQIHGPASFK

SEQ ID NO: 397 - DNA, 645 bp, Unknown
  Obtained from metagenome sequencing
atgaacgacacggcgaaccttacgctgcatttgggcgctctgcctgttatggcccaggccgctgaggaggttgccgctatgacccgcaccgccgatgcgctgctcttaaacatgggtaccctgacgccagcggcgctagacgccatgcgccttgccgggcgagaagccaatagatgcggcgttcctgtggtactagaccctgtgggcgctggcgcaacgccttaccgtacggaggcagcgcggcagcttttagaagacatcaacgttgctattgtgcgtgggaattccggagaagtcgccgccatcattggacagcaagccgtggtgcgcggcgtggaaagccttgagactgcgctgcctgccgcggagctcggggcgcaggcggcgcagcagctaggtgtggttgtggccctaacaggtgcgcgcgacatcatcagcgacggcagcgtaagcctagcggtggaccacggctcgccttggctcaagacgatcacgggcagcggttgcatggcaagcgctgcggtcgcttgttttgcggcggtagcacctagctctttgcaggcggccgcggcggcgcttgcagcttatgggctagcggctgagctagcccataagccgcaaattcacgggccagcgtcgtttaag

SEQ ID NO: 398 - DNA, 648 bp, Artificial sequence
  Codon optimised sequence
atgaacgataccgcaaatctgaccctgcatctgggcgcactgccggtgatggcacaggcagcagaagaagtggccgccatgacccgtaccgcagatgccctgctgctgaatatgggtaccctgaccccggccgcactggatgccatgcgcctggcaggtcgtgaagccaatcgttgcggtgttccggtggtgctggaccctgtgggtgccggtgcaaccccgtatcgtaccgaagcagcacgccagctgctggaagatattaatgttgccattgttcgtggtaatagcggtgaagttgccgccattattggtcagcaggcagtggttcgcggcgtggaaagcctggaaaccgccctgccggcagcagaactgggtgcacaggcagcccagcagctgggcgtggttgttgccctgaccggtgcccgcgatattattagtgatggcagcgttagcctggccgttgatcatggtagcccgtggctgaaaaccattaccggtagcggttgtatggccagcgccgccgtggcatgcttcgcagctgttgccccgagcagtctgcaagcagccgccgcagcactggcagcctatggtctggcagcagaattagcacataaaccgcagattcatggcccggcatcattcaaataa

SEQ ID NO: 399 - protein, 203 aa, Unknown
  Obtained from metagenome sequencing
MAAGMAPAMVDNPHEAGDFARVASGVLVHLGPPQDHPVAAMKAAVRAADEAGTPWVLDPVAAGGLRWRTRVALELLDISRPAIIRGNASEIAGLAGGAGGRGVDSTTSPEEVLDLARALAQRHRCAVAVSGPVDHFVDAERVVTLANGHRWLTRITGVGCSLGALMAGFAGVTEDPLVAAAGATAVITVAADQAAGTTGLGGF

SEQ ID NO: 400 - skipped

SEQ ID NO: 401 - DNA, 612 bp, Artificial sequence
  Codon optimised sequence
atggccgcaggcatggcccctgcaatggtggataatccgcatgaagcaggtgacttcgcccgtgttgcaagcggtgttctggttcatctgggcccgccgcaggatcatccggttgcagcaatgaaagcagcagtgcgtgccgcagatgaagccggtaccccgtgggttctggaccctgtggccgcaggtggtctgcgctggcgtacccgtgtggccctggaactgctggatattagccgcccggcaattattcgtggcaatgcaagcgaaattgccggcctggcaggtggtgcaggcggccgtggtgttgatagtaccaccagtccggaagaagtgctggatctggcccgcgcactggcacagcgtcatcgttgcgcagttgcagttagcggtccggttgatcacttcgttgatgccgaacgcgttgttaccctggccaatggtcatcgctggctgacccgtattaccggcgtgggttgcagcctgggtgccctgatggcaggcttcgcaggtgtgaccgaagatccgctggttgcagcagcaggcgcaaccgcagttattaccgtggccgcagatcaggcagcaggtaccaccggcctgggtggcttctaa

SEQ ID NO: 402 - protein, 299 aa, Unknown
  Obtained from metagenome sequencing
MSALRKIVAKVGTNVLAREDGLLDITSISHLVDQIAALKAQGVEVILVSSGAVGAGRSLFPVPEGANKVVRRQVLSAIGQVRLMEIYRQLFANHGLFCAQVLATKADFQGKTHYTNMKSCFQALLRDKVVPVVNENDVVSVNELMFTDNDELAGLVAAMTNAQALIILSSVDGVLSGPPGEPGSEVIPEIDPEDKQWLKLILPSKSSFGRGGMHTKFRIAQKAAKAGITTYIANGRRPNILLDILKGQFTGTRFPATGRLSNLKKRLAYGEPESKASVHINRGAEAALCSPDQISSLLP

SEQ ID NO: 403 - skipped

SEQ ID NO: 404 - DNA, 906 bp, Artificial sequence
  Codon optimised sequence
atgagcgcactgcgcaaaattgtggccaaagtgggcaccaatgtgctggcacgcgaagatggcctgctggatattaccagcattagtcatctggttgatcagattgccgcactgaaagcccagggtgttgaagtgattctggtgagcagtggcgcagttggtgccggtcgtagtctgttcccggttccggaaggtgcaaataaagttgtgcgtcgtcaggttctgagtgccattggtcaggtgcgcctgatggaaatctatcgccagctgttcgccaatcatggtctgttctgcgcccaggttctggcaaccaaagcagacttccagggtaaaacacattataccaatatgaaaagctgcttccaggcactgctgcgtgataaagttgttccggtggtgaatgaaaatgatgtggtgagcgtgaatgaactgatgttcaccgataatgatgaactggccggcctggtggccgccatgaccaatgcccaggcactgattattctgagcagtgttgatggcgttctgagcggcccgccgggtgaacctggtagtgaagttattccggaaattgatccggaagataaacagtggctgaaactgattctgccgagcaaaagtagcttcggccgcggcggtatgcataccaaattccgtattgcccagaaagccgccaaagccggcattaccacctatattgcaaatggccgtcgtccgaatattctgctggatatcctgaaaggccagttcaccggtacccgcttcccggcaaccggccgtctgagtaatctgaaaaaacgtctggcatacggtgaaccggaaagtaaagcaagcgttcatattaatcgcggcgcagaagccgccctgtgcagtcctgatcagattagcagcctgctgccgtaaggatcc

SEQ ID NO: 405 - protein, 218 aa, Unknown
  Obtained from metagenome sequencing
MRGLGDVYKRQNSRSILLSELILLKLGGSVITDKTRPFTARTDVIQRLAQEIKSALAERGDDLRLIIGHGSGSFGHEVADKYQTHKGGTSAESWLGFAEVAHVAATLNHLVVNALREVGVPAMRFQPSASTRTRGEQLMYFETFPLKEALSHGLVPVVYGDVSVDAAQGMSIVSTELLFDNLARELSPSRIVLAGRVDGVYEADPNLNPLSLIHISEP

SEQ ID NO: 406 - skipped

SEQ ID NO: 407 - DNA, 663 bp, Artificial sequence
  Codon optimised sequence
atgcgcggtctgggtgatgtgtataaacgtcagaatagccgcagcattctgctgagtgaactgattctgctgaaactgggcggtagcgttattaccgataaaaccagaccgttcaccgcacgcaccgatgttattcagcgtctggcacaggaaattaaaagcgccctggcagaacgtggcgatgatctgcgtctgattattggccatggtagtggcagcttcggtcatgaagttgcagataaatatcagacccataaaggtggtaccagtgcagaaagttggctgggcttcgccgaagtggcacatgttgcagcaaccctgaatcatctggttgtgaatgcactgcgtgaagtgggcgtgccggccatgcgcttccagcctagtgcaagcacccgtacccgtggtgaacagctgatgtacttcgaaaccttcccgctgaaagaagccctgagtcatggtctggttccggttgtgtatggcgatgttagcgtggatgccgcccagggcatgagtattgtgagcaccgaactgctgttcgataatctggcacgtgaactgagcccgagccgtattgttctggcaggccgtgtggatggcgtgtatgaagcagatccgaatctgaatccgctgagtctgattcatattagcgaaccgtaaggatcc

SEQ ID NO: 408 - protein, 239 aa, Unknown
  Obtained from metagenome sequencing
MAGGHIHHLAKKYNLTTSCAENPGKLAQALDVQKTTKRLSDDIVALAGKTNFSLSQIPTCKIVTNKDGKFLNIATDGIQKTLATAGVPVLYGDMVPDETFGLSICSGDTLITEEAPLIGATRVIYVSDIDGIYTGDPYQNEDAELIEKISVAELSNNHISIGNSHNIDVTGGLKNKLEPVAKLFLSTPSLTKIEICNGLKPHILSAVLRGQAVPHTAGSQPPQLVIRTTLMSPVVLKIN

SEQ ID NO: 409 - skipped

SEQ ID NO: 410 - DNA, 726 bp, Artificial sequence
  Codon optimised sequence
atggccggtggccatattcatcatctggcaaaaaaatataacctgaccaccagctgtgccgaaaatccgggtaaactggcccaggccctggatgttcagaaaaccaccaaacgtctgagcgatgatattgtggcactggccggtaaaaccaacttcagtctgagtcagattccgacctgcaaaattgtgaccaataaagatggtaaattcctgaatatcgccaccgatggtattcagaaaaccttagccaccgcaggcgttccggtgctgtatggtgatatggttccggatgaaaccttcggcctgagtatctgtagtggtgataccctgattaccgaagaagccccgctgattggcgccacccgtgttatctatgtgagtgatattgatggtatctataccggtgatccgtatcagaatgaagatgcagaactgattgaaaaaatcagcgtggcagaactgagtaataatcatattagcattggcaatagccataatattgatgttaccggcggcctgaaaaataaactggaaccggtggccaaactgttcctgagtaccccgagcctgaccaaaattgaaatctgtaatggcctgaaaccgcatattctgagcgccgttctgcgtggccaggccgtgcctcataccgcaggcagccagccgccgcagctggttattcgcaccaccctgatgagtccggtggtgctgaaaattaattaaggatcc

SEQ ID NO: 411 - protein, 370 aa, Unknown
  Obtained from metagenome sequencing
MMLGNAKRIVIKVGSSLLIDAENQLRGNFLAQIAESIAALISEGKQVIVVTSGAVALGRPSLGYGARTLTLEEKQAAAACGQITLFSMWDKAFSAFQLRPAQILLTADDSIHRRRYLNAKNTLDTLLENKSVIPVINENDTVATAELRFGDNDRLAARVAQMAEADLLIIFSDIDGLYSENPNHNPDARFIDEVTEITPEIEKMAGGAASSVSSGGMVTKIAAAKIATASGCHVIIAKGLGEHPLRALIQGGKHTHFMAKGTPRTARKEWIAGSLHATGEIWVDAGAVKALQSGKSLLPAGVTLVIGSFDRGDAVNIIDAATTKVIGKGLIAYAAEDAARIAGKKSQEIEQILGFKRRDVLIHRDDMVLE

SEQ ID NO: 412 - DNA, 1110 bp, Unknown
  Obtained from metagenome sequencing
atgatgttaggcaacgcaaaacgcattgttatcaaagttggctcatcgctcttgattgacgcggaaaaccagctgcgcggcaattttctggcgcagatagcagaaagcattgccgccctcatcagcgaaggcaagcaggtgattgtggtgacatccggtgcggtggcgcttggccgcccttcgttgggatatggcgcacgtacgcttacgctcgaagaaaaacaggcggccgctgcctgcgggcagatcacgctattttccatgtgggataaagcgttctccgcgtttcagcttagacctgcgcagatattgcttacggccgatgacagcatccatcgccgccggtatctgaatgcaaaaaatacactcgatacattgcttgaaaacaaatccgtcatccccgttatcaatgaaaatgacacagtggcgacggcagaattacgcttcggtgataatgaccggctggctgcgcgcgtcgcgcaaatggcggaagcggatctgctgattattttctcggatattgatgggttatactcagaaaatcctaaccataatcctgatgcccgctttattgacgaagtaaccgaaatcacacctgaaatcgaaaaaatggcaggcggtgcggcatccagcgtgtcatccggcggaatggtgacgaaaattgctgcagctaaaatcgcaactgcttctggctgccatgtgattattgcaaaaggtcttggagagcatcccctgcgtgcacttatacaaggcggcaaacatacgcatttcatggccaagggaacaccacgcacagcgcgcaaggaatggatcgcagggtcgctgcatgcaacgggtgaaatttgggtcgatgcaggtgcagtaaaagcattacaatcaggtaaaagtttgttgcctgcaggcgtaacgctggtcataggaagttttgatcgtggagatgctgtaaatattattgatgcagcaaccaccaaagtgatcggcaaaggcttaatcgcttatgcagcggaagatgctgcgcgtattgccggcaaaaaaagccaggaaattgaacagattcttggttttaaacgtcgtgatgtgctcattcaccgcgacgatatggtactggaa

SEQ ID NO: 413 - DNA, 1119 bp, Artificial sequence
  Codon optimised sequence
atgatgctgggtaatgcaaaacgtattgtgattaaagtgggtagcagcctgctgattgatgccgaaaatcagctgcgcggcaacttcctggcacagattgcagaaagtattgccgcactgattagcgaaggcaaacaggttattgttgttaccagtggtgccgtggcactgggtcgcccgagcttaggttatggcgcacgcaccctgaccctggaagaaaaacaggccgcagcagcatgtggccagattaccctgttcagtatgtgggataaagccttcagcgccttccagctgcgcccggctcagattctgctgaccgcagatgatagcattcatcgtcgccgttatctgaatgcaaaaaataccctggataccctgctggaaaataaaagtgttattccggtgattaacgaaaatgataccgttgcaaccgccgaactgcgcttcggtgataatgatcgtctggccgcccgtgtggcacagatggcagaagccgatctgctgattatcttcagtgatattgatggtctgtatagtgaaaatccgaatcataatccggatgcccgcttcattgatgaagtgaccgaaattaccccggaaattgaaaaaatggccggtggtgccgcaagcagtgttagtagcggtggtatggttaccaaaattgccgccgccaaaattgccaccgccagtggttgccatgttattattgcaaaaggtctgggtgaacatccgctgcgcgcactgattcagggcggcaaacatacccacttcatggccaaaggtaccccgcgcaccgcacgtaaagaatggattgcaggcagtctgcatgcaaccggtgaaatctgggttgatgccggcgcagttaaagccctgcaaagcggtaaaagtctgctgccggccggcgttaccctggttattggtagcttcgatcgtggcgatgccgtgaatattattgatgcagcaaccaccaaagtgattggtaaaggtctgattgcctatgcagccgaagatgccgcccgtattgccggtaaaaaaagccaggaaattgaacagattctgggcttcaaacgccgtgatgtgctgattcatcgcgatgatatggttctggaataaggatcc

SEQ ID NO: 414 - protein, 237 aa, Unknown
  Obtained from metagenome sequencing
MSSLTSEADGQLDPNRIQALVDTLAAARSAGREIVLLGDVYKRQGIGPLGLSRRPNDLPTQQAAASVGQGLLVAHYTRRFHEYGWPVGQVLLTVDDVTRQQHYRNAYRTFEKLLQLGVIPIVNENDTVATHEIRFGDNDRLAALVAQLVHADALFLFSDVDALYTDHPSTPDARRIALVNSSADLLGVDTSRTGSRVGTGGMTTKIQAAGIATSAGVPVRVAAAANASAAPAGGAVA

SEQ ID NO: 415 - skipped

SEQ ID NO: 416 - DNA, 720 bp, Artificial sequence
  Codon optimised sequence
atgagcagtctgaccagtgaagccgatggtcagctggaccctaatcgtattcaggccctggtggataccctggcagcagcacgcagcgccggtcgtgaaattgtgctgctgggtgatgtgtataaacgccagggtattggtccgctgggcctgagccgccgtccgaatgatctgccgacccagcaggccgcagcaagtgttggtcagggcctgctggttgcacattatacccgccgcttccatgaatatggctggccggttggtcaggttctgctgaccgtggatgatgttacccgccagcagcattatcgtaatgcatatcgcaccttcgaaaaactgctgcaactgggtgttattccgattgtgaatgaaaatgataccgtggcaacccatgaaattcgcttcggtgataatgatcgcctggccgcactggttgcacagctggttcatgcagatgcactgttcctgttcagcgatgtggatgccctgtataccgatcatccgagcaccccggatgcacgccgcattgccctggtgaatagcagcgcagacttactgggtgttgataccagccgtaccggtagccgcgttggtaccggtggcatgaccaccaaaattcaggcagcaggcattgccaccagcgcaggtgtgccggttcgcgttgcagccgcagccaatgcaagtgccgccccggctggtggtgcagttgcataaggatcc

SEQ ID NO: 417 - protein, 299 aa, Unknown
  Obtained from metagenome sequencing
MDGIRDQSSSRGGWRCMTNPALTDDAPVVFLKLGGSLITDKTRPETDRPDILSRLAGELAQARARAPRIRLLLGHGSGSFGHAAAARHGTRAGVAGPAGWLGFAEVADAAARLNRVVAAQMLAAGLPKRQVQPSAGALCRDGSLTAWQIDAVEGALARGLIPLVYGDAVLDTVRGGTIASTEELFGWLTPRLQPVRIVLAGVVDGVYDADPLSNPRAARIGEITPATLPSLARQLGGSHGVDVTGGMLSKVTEMCRLVAAHPRTEVWLVSGQRAGAVLQALLGEDAGGTRIAAEGKGSL

SEQ ID NO: 418 - skipped

SEQ ID NO: 419 - DNA, 906 bp, Artificial sequence
  Codon optimised sequence
atggatggtattcgtgatcagagtagcagtcgcggtggttggcgctgcatgaccaatccggccctgaccgatgatgccccggttgtgttcctgaaactgggcggtagtctgattaccgataaaaccagaccggaaaccgatcgtccggatattctgagtcgtctggcaggcgaactggcccaggcacgtgcacgcgcaccgagaattagactgctgctgggtcatggtagcggtagcttcggtcatgcagccgcagcacgccatggtacccgtgccggtgtggccggtccggcaggttggttaggcttcgcagaagtggcagatgccgccgcccgcctgaatcgtgttgttgcagcacagatgctggcagcaggcctgccgaaacgtcaggttcagccgagtgccggtgccctgtgtcgtgatggtagcctgaccgcctggcagattgatgccgtggaaggcgcactggcacgcggtctgattccgctggtgtatggcgatgccgtgctggataccgttcgcggcggcaccattgcaagtaccgaagaactgttcggctggctgaccccgcgcctgcaaccggttcgcattgttctggccggtgttgtggatggcgtgtatgatgccgatccgctgagtaatccgcgtgccgcacgcattggtgaaattaccccggccaccctgccgagcctggcaagacagctgggcggttcacatggcgttgatgtgaccggtggcatgctgagcaaagttaccgaaatgtgtcgtctggttgcagcacatccgcgtaccgaagtgtggctggttagcggccagcgtgccggtgccgttctgcaagcactgctgggtgaagatgccggtggcacccgtattgcagcagaaggtaaaggcagcctgtaaggatcc

SEQ ID NO: 420 - protein, 534 aa, Unknown
  Obtained from metagenome sequencing
MSDVYKRQPELRHRRHPGPDRGGLGGGGAGRPLPRPYRALRHADPPRRRHGRASRRGLADGARRARGLWPRAGGEARDPLPQQDRRPDPGGDRGAQAPARGGFGRARALHLGRGEGGAGGGAARGAGSCRRPACGRGGGRGSASEVYKSQALLARRRVTIKIGSALLVDGEGRIRRAWLDGLAADIGELARRGSRVIVVTSGAIALGRRALGLPQRALRLEEKQAAAAAGQILLAGAWAESLAGHGLIAAQLLVTLGDTEGRRRYLNARATIETLLKLGAVPVVNENDTVATTEIRYGDNDRLSARVAVMSGAETLVLLSDVDGLYTADPGRDPAARHIPEVGAITAEIEAMATGSGSAVGTGGMASKLVAATIATQSGCAVLLTSGKPDRPLEALRSGARCTVFAARSTPRRARKHWLAATLKPAGRLTVDDGALAALRRGSSLLPAGVAAVEGRFERGDAVLVQNLQGTVVAKGLVAYDAADAERLRGRRTADIEALLGYRGRDEMIHRDDLVLVQAPGEPAGEAAVGAGAP

SEQ ID NO: 421 - skipped

SEQ ID NO: 422 - DNA, 1611 bp, Artificial sequence
  Codon optimised sequence
atgagcgatgtgtataaacgtcagccggaactgcgccatcgtcgccatccgggtccggatcgcggtggtctgggcggtggtggtgccggtcgtcctctgcctcgcccttatcgtgcactgcgtcatgccgatccgccgcgccgtcgtcatggtcgtgcctcacgccgtggtctggcagatggcgcacgtcgcgcccgtggtctgtggcctcgtgcaggtggcgaagcccgcgatccgctgcctcagcaggatcgccgtccggaccctggcggtgatcgcggtgctcaggcccctgctcgcggtggcttcggtcgtgcacgcgcactgcatctgggccgcggtgaaggtggcgccggtggtggtgctgcccgtggtgcaggtagctgtcgtcgcccggcatgcggccgtggtggtggtagaggtagtgcaagtgaagtgtataaaagtcaggcactgctggcacgccgtcgcgttaccattaaaattggtagcgcactgctggtggatggtgaaggtcgtattcgccgcgcatggctggatggcctggcagcagatattggtgaactggcccgtcgtggcagccgtgttattgtggttaccagtggcgcaattgccctgggccgccgtgccttaggcctgcctcagcgtgcactgcgcctggaagaaaaacaggccgcagcagcagccggccagattctgctggccggcgcatgggccgaaagtctggccggtcatggcctgattgcagcccagctgctggtgaccctgggcgataccgaaggccgtcgtcgttatctgaatgcacgcgcaaccattgaaaccttactgaaactgggtgcagtgccggttgtgaatgaaaatgataccgtggccaccaccgaaattcgctatggtgataatgatcgcctgagtgcacgcgttgccgttatgagcggtgccgaaaccttagtgctgctgagcgatgtggatggcctgtataccgccgatccgggtcgtgatccggcagcccgtcatattccggaagttggtgccattaccgcagaaattgaagccatggccaccggtagtggtagcgccgttggtaccggtggtatggccagtaaactggttgccgccaccattgccacccagagcggctgtgcagtgctgctgaccagcggtaaaccggatcgcccgctggaagccctgcgtagtggcgcacgttgtaccgtgttcgccgcacgtagcaccccgcgccgtgctagaaaacattggctggcagccaccctgaaaccggccggccgtctgaccgtggatgatggcgccctggcagcactgcgtcgcggttcaagtctgctgccggcaggcgtggcagccgttgaaggtcgcttcgaacgcggcgatgcagtgctggtgcagaatctgcaaggcaccgttgttgccaaaggtctggtggcatacgatgccgccgatgccgaacgtctgcgcggtcgtcgtaccgccgatattgaagcactgctgggttatcgcggtcgcgatgaaatgattcatcgcgatgatctggttctggttcaggcaccgggcgaaccggccggtgaagcagcagtgggcgccggtgcaccgtaaggatcc

SEQ ID NO: 423 - protein, 267 aa, Unknown
  Obtained from metagenome sequencing
MADRKIIESTLARTNLTDHDLANVAYSPTAVMPDVRVVKIGGQSVMDRGRAALFPILDELVAARKEGIAVVVLVGGGTRARHIYSIASELEMPVGVMATLGKYIPMQNARMVQMLLAKHGGLYILPDDFEKLPLYLQLGCLPVMSGMPPFGYWEKREEGSRIPPHRTDAGVFLSAEFLGARRAIFIKDEDGLYEDDPKKNPAAKHIPRITAKELEARGLPDLVVERVVVEYLPRARWCKQLQIVNGLKKGQVLAALKGEDVGTIISA

SEQ ID NO: 424 - skipped

SEQ ID NO: 425 - DNA, 804 bp, Artificial sequence
  Codon optimised sequence
atggccgatcgtaaaattattgaaagcaccctggcacgcaccaatctgaccgatcatgatctggccaatgtggcatatagtccgaccgcagttatgccggatgttcgcgtggttaaaattggcggtcagagcgttatggatcgtggccgtgccgccctgttcccgattctggatgaactggttgccgcccgcaaagaaggtattgccgtggttgtgctggtgggtggtggcacccgtgcccgtcatatctatagcattgcaagtgaactggaaatgccggtgggtgtgatggccaccctgggcaaatatattccgatgcagaatgcacgcatggttcagatgctgctggcaaaacatggcggtctgtatattctgccggatgacttcgaaaaactgccgctgtatctgcaactgggctgcctgccggttatgagtggtatgccgccgttcggttattgggaaaaacgcgaagaaggcagtcgcattccgccgcatcgcaccgatgcaggtgtgttcctgagtgccgagttcctgggcgcacgccgcgcaatcttcattaaagatgaagatggtctgtatgaagatgatccgaaaaaaaatccggccgcaaaacatattccgcgcattaccgcaaaagaactggaagcacgtggtctgccggatctggttgttgaacgcgttgtggttgaatatctgccgcgcgcacgctggtgtaaacagctgcaaattgtgaatggtctgaaaaaaggccaggttctggcagccctgaaaggtgaagatgttggtaccattattagcgcctaa

SEQ ID NO: 426 - protein, 263 aa, Unknown
  Obtained from metagenome sequencing
MSDLTFLKLGGSLLTDKPEREALRADVLARLTNEIAAARYARPDMKLVMGHGSGSFGHTAAARHGTRSGVSGPEQWRGFAEVSDAAARLNRAVIAALLSAGVPAVGLPPSASAVVTDGVIQAMATAPIRAALEAGLLPVVFGDVAFDTVRGGTIVSTEEVMDYLALPMRPARLLLAGETAGVLDTTGQVVPHISPANYETIRPALGGSRGADVTGGMSSKVSAMLDLAAKIPGLTIHIFSGLEPGLLEQLLISPSLSSGTRIG

SEQ ID NO: 427 - skipped

SEQ ID NO: 428 - DNA, 792 bp, Artificial sequence
  Codon optimised sequence
atgagcgatctgaccttcctgaaactgggcggtagcctgctgaccgataaaccggaacgtgaagcactgcgcgcagatgttctggcccgtctgaccaatgaaattgcagcagcacgttatgcacgtccggatatgaaactggttatgggtcatggcagcggtagcttcggtcataccgcagccgcccgccatggtacccgtagcggtgtgagcggtccggaacagtggcgtggcttcgcagaagtgagcgatgccgccgcacgtctgaatcgcgccgttattgcagccctgctgagtgccggcgttccggctgttggcctgccgcctagtgccagcgcagtggttaccgatggtgttattcaggcaatggccaccgccccgattcgtgccgcactggaagccggtctgctgccggtggtgttcggcgatgttgccttcgataccgtgcgtggcggtaccattgtgagcaccgaagaagtgatggattatctggccctgccgatgcgcccggcccgtctgttactggcaggcgaaaccgcaggcgtgctggataccaccggtcaggttgtgccgcatattagcccggcaaattatgaaaccattcgcccggccctgggcggcagtcgtggtgcagatgttaccggcggtatgagtagcaaagtgagcgcaatgctggatctggcagccaaaattccgggtctgaccattcatatcttcagcggcctggaaccgggcctgctggaacagctgctgattagcccgagtctgagcagcggtacccgtattggctaa

SEQ ID NO: 429 - protein, 182 aa, Unknown
  Obtained from metagenome sequencing
MEIRGTLEENPDIRLIIIHGAGAGGHQLAKKYRLTENLGNDPERWTGAFLTRQANQLLNLELFKIFSKANLRVVPIHTASIITQRQKEIASCSFESINQTLAHNCIPLLYGELVFDETLGMSILSGDTSAFILAEKYQAERVLFASDIDGIFNKDPHKNKDAKLIQVTTLKELLENKNVSLS

SEQ ID NO: 430 - DNA, 546 bp, Unknown
  Obtained from metagenome sequencing
atggaaatacgcggcactctcgaagagaatcccgatatacgtctcattataattcacggtgccggtgccggcgggcatcagcttgccaagaaatatcgcctcacggaaaacctcgggaatgatcccgagcgatggaccggcgcctttctcaccagacaagccaatcagttactcaatctcgaattgttcaagatattctcaaaagcaaaccttcgagtcgttccaattcacactgcatccattattactcaacgacagaaagaaatagcgtcttgttctttcgaatccatcaatcagacgctcgcacacaattgcattccacttctctatggcgaacttgtgttcgacgagacacttggcatgtccatactctccggagacaccagcgctttcatcttggcagaaaaatatcaagctgaacgggttttgtttgcatcagacatagacggcatcttcaacaaagacccccacaaaaacaaagacgcaaaactcatacaagttactacactcaaagagttgctggaaaacaaaaacgtctcactttcc

SEQ ID NO: 431 - DNA, 549 bp, Artificial sequence
  Codon optimised sequence
atggaaatccgtggtaccctggaagaaaatccggatattcgcctgattattattcatggcgcaggcgcaggtggtcatcagctggccaaaaaatatcgcctgaccgaaaatctgggtaatgatccggaacgctggaccggcgcattcctgacccgtcaggcaaatcagctgctgaatctggaactgttcaaaatcttcagtaaagcaaatctgcgtgtggttccgattcataccgcaagcattattacccagcgtcagaaagaaattgccagctgctcattcgaaagtattaatcagaccctggcacataattgcattccgctgctgtatggcgaactggtgttcgatgaaaccttaggcatgagtattctgagcggcgataccagtgccttcattctggcagaaaaatatcaggcagaacgtgttctgttcgcaagcgatattgatggcatcttcaataaagatccgcataaaaataaggacgcaaaactgattcaggttaccaccctgaaagaactgctggaaaataaaaatgtgagtctgagctaa

SEQ ID NO: 432 - protein, 241 aa, Unknown
  Obtained from metagenome sequencing
MSERLKNSKRIVIKAGTSILTGKDGRFSPAHLARLCDQILALVNKKKEVVLVSSGAIGLGMEVTSFKKRPKKMAQLQACAAIGQGKLMHAYEQFFSKRGIHTAQILLTRDGLEDRERFLRASGAVAEILKMKVLPIVNENDTVSTEEIAFGDNDRLSVHVSHLVDADLLILLSDVDGFYLNDGSRIRLVSSIREIREELVKHVKDSRKEKTVGGMSAKLKAATTAMNLGIPMLIVNGHEPG

SEQ ID NO: 433 - skipped

SEQ ID NO: 434 - DNA, 726 bp, Artificial sequence
  Codon optimised sequence
atgagcgaacgcctgaaaaatagcaaacgtattgttattaaggccggcaccagcattctgaccggcaaagatggtcgcttcagtccggcccatctggcccgtctgtgtgatcagattctggcactggttaataaaaaaaaagaggtggttctggtgagtagtggcgcaattggtctgggcatggaagtgaccagcttcaaaaaacgtccgaaaaaaatggcacagctgcaagcctgcgccgccattggtcagggcaaactgatgcatgcatacgaacagttcttcagtaaacgtggtattcataccgcacagattctgctgacccgtgatggtctggaagatcgtgaacgcttcctgcgtgcaagcggtgccgtggcagaaattctgaaaatgaaagttctgccgattgtgaatgaaaatgataccgttagcaccgaagaaattgccttcggcgataatgatcgcctgagcgtgcatgtgagtcatctggttgatgccgatctgctgattctgctgagtgatgtggatggcttctatctgaatgatggcagtcgtattcgcctggttagcagcattcgcgaaattcgtgaagaactggttaaacatgttaaagatagccgcaaagaaaaaaccgtgggtggtatgagtgcaaaactgaaagccgcaaccaccgcaatgaatctgggcattccgatgctgattgttaatggtcatgaaccgggctaa

SEQ ID NO: 435 - protein, 289 aa, Unknown
  Obtained from metagenome sequencing
MKTLLWLNRAMKELVLLKLGGSLITDKTQPFTPRLDVMDDLALQIKTALQIRVDLQLVLGHGSGSFGHVPASEYRTRDGLPPRATPLAHRERDATEENYWRGFAEVWYQASALNRFVMEALHRADVPSIALSPAASVIASNGQVSVWETTPLRMALSAGIVPVVYGDVVCDEVRGGTILSTEDLFSHLTRALNPDRILLAGLEAAVWEDFPTRTKKIERITPASFREVSSGVGKAAGADVTGGMESKVRQMLELVQKVPGLTIQVFSGEEPGNLVRALGGETLGTLITA

SEQ ID NO: 436 - skipped

SEQ ID NO: 437 - DNA, 876 bp, Artificial sequence
  Codon optimised sequence
atgaagaccctgctgtggctgaatcgtgcaatgaaagaactggtgctgctgaaactgggtggcagcctgattaccgataaaacacaaccgttcaccccgcgtctggatgtgatggatgatctggcactgcaaattaaaaccgcactgcaaatccgtgtggatctgcaactggttctgggccatggcagtggcagcttcggtcatgtgccggcaagcgaatatcgtacccgtgatggtctgccgccgcgcgcaacccctctggcacatcgtgaacgcgatgcaaccgaagaaaattattggcgtggcttcgccgaagtgtggtatcaggcaagcgcactgaatcgcttcgtgatggaagcactgcatcgcgccgatgttccgagcattgccctgagtccggccgcaagcgttattgcaagcaatggtcaggtgagcgtgtgggaaaccaccccgctgcgtatggcactgagcgcaggtattgttccggttgtgtatggcgatgttgtgtgtgatgaagttcgcggtggtaccattctgagcaccgaagacttattcagccatctgacccgtgcactgaatccggatcgcattctgctggccggtctggaagcagcagtgtgggaagacttcccgacccgtaccaaaaaaattgaacgtattaccccggccagcttccgcgaagtgagcagtggcgttggcaaagccgcaggtgcagatgttaccggtggtatggaaagtaaagtgcgccagatgctggaactggtgcagaaagtgccgggcctgaccattcaggtgttcagtggcgaagaaccgggtaatctggtgcgcgcactgggcggcgaaaccttaggcaccctgattaccgcctaaggatcc

SEQ ID NO: 438 - protein, 295 aa, Unknown
  Obtained from metagenome sequencing
MEDIADLFKSGREVLIVSSGAVGLGVKELALDKRPADLPTTQACAAVGQGILQSMYADAFKRLGVKTAQVLLCEEDFTNRKKYLNLRSTIARLLELGVIPIINENDTVSTSEIESSATASGRKVNFGDNDKLSALVASKVDADMLLILTDVNGLYSDDPNTCPDAELIDTVADLAPYQIPKTEKKVNGKKGAHQGGRGGIRSKLEAAAVVTQSGLPCVIAGGRNHKVIERLFNGESLGTIFLPGAAMAGKSRWIAFATTINGSVTVNQGARDALVKKKASLLPAGIVKVDGSFAR

SEQ ID NO: 439 - skipped

SEQ ID NO: 440 - DNA, 894 bp, Artificial sequence
  Codon optimised sequence
atggaagatatcgccgatctgttcaaaagtggccgtgaagttctgattgtgagtagtggcgcagttggtctgggcgttaaagaactggccctggataaacgtccggcagacttaccgaccacccaggcctgcgcagcagtgggtcagggtattctgcaaagcatgtatgccgatgcattcaaacgtctgggtgtgaaaaccgcccaggttctgctgtgtgaagaagacttcaccaatcgtaaaaaatatctgaatctgcgcagcaccattgcacgtctgctggaactgggtgttattccgattattaatgaaaatgacaccgtgagcaccagcgaaattgaaagtagcgcaaccgcaagtggccgcaaagttaacttcggcgataatgataaactgagtgcactggtggcaagtaaagttgatgcagatatgctgctgattctgaccgatgttaatggcctgtatagtgatgatccgaatacctgtccggatgccgaactgattgataccgttgccgatctggccccgtatcagattccgaaaaccgaaaaaaaagtgaatggtaaaaagggcgcccatcagggcggccgcggtggtattcgcagcaaactggaagcagcagcagttgtgacccagagcggcctgccgtgcgtgattgccggtggccgtaatcataaagtgattgaacgtctgttcaatggtgaaagcctgggcaccatcttcctgccgggcgcagcaatggccggcaaaagccgttggattgcattcgccaccaccattaatggtagtgttaccgtgaatcagggcgcacgcgatgccctggttaaaaaaaaagcaagcctgctgccggccggcattgtgaaagttgatggcagcttcgcccgctaaggatcc

SEQ ID NO: 441 - protein, 227 aa, Unknown
  Obtained from metagenome sequencing
MEDKIVISLGGSLIVPEEIDVEFLKSFKELIIGEIAKGKKFILITGGGRVCRKYQNVAKDISNPNHEDLDWIGIASLKLNAELLRVIFKDHAYNRVVENLSLPFPFEDSIVIGSAYEPGHSTDYDAVLGAQSIGAKTIINLSNTDYVYDSDPKTNPDAKKIETITWDEYQKIIPAEWHPGLSTPFDPTASVLAKQEGITVISMNGKPISNLANCLNGENFIGTTIKP

SEQ ID NO: 442 - DNA, 681 bp, Unknown
  Obtained from metagenome sequencing
atggaagacaaaatagtaatttccctagggggttcattaatagtgccagaagagattgatgttgagtttctaaagtcttttaaagaattgattattggggaaattgctaaaggcaagaaatttattttaataactggaggtggtagagtttgcagaaagtatcagaatgttgctaaggatatttctaatccaaaccatgaagatctggattggataggtattgcatctttaaaattaaacgcagaacttttgcgagttatttttaaagaccatgcttataatagagttgttgagaatttatcgctaccttttccctttgaagattcaatagtgattggatctgcttatgaaccaggacacagtactgattatgatgccgtacttggggctcaaagtattggagcgaaaactataattaatttatctaatactgattacgtatatgattctgaccctaagactaatcctgatgctaaaaaaatagaaactataacctgggacgaatatcaaaagattattcccgcagagtggcaccccggacttagcactccatttgatcccactgcgtctgttttagccaaacaggaaggcattacagtgattagtatgaacggtaaaccaatttccaatttagctaattgtttaaatggagaaaatttcatcggcacaaccattaaacca

SEQ ID NO: 443 - DNA, 690 bp, Artificial sequence
  Codon optimised sequence
atggaagataagatcgttatcagtctgggtggtagtctgattgtgccggaagaaattgatgtggagttcctgaaatcattcaaagaactgattatcggtgaaattgccaaaggcaaaaaattcattctgattaccggcggtggtcgcgtgtgtcgtaaatatcagaatgttgcaaaagatatcagcaatccgaatcatgaagacttagattggattggcattgcaagcctgaaactgaatgccgaactgctgcgcgtgatcttcaaagatcatgcctataatcgtgtggttgaaaatctgagcctgccgttcccgttcgaagatagtattgtgattggcagtgcatacgaaccgggccatagtaccgattatgatgccgttctgggcgcacagagtattggtgccaaaaccattattaatctgagtaataccgactatgtgtatgatagcgatccgaaaaccaatccggatgccaaaaaaattgaaaccattacctgggatgaatatcagaaaattatcccggccgaatggcatccgggcctgagcaccccgttcgatccgaccgccagtgtgctggcaaaacaggaaggcattaccgtgattagcatgaatggtaaaccgattagtaatctggcaaattgcctgaatggtgaaaacttcattggtaccaccattaaaccgtaaggatcc

SEQ ID NO: 444 - protein, 368 aa, Unknown
  Obtained from metagenome sequencing
MTDSPRKRIVVKVGSALIAPHKQGCSSHYLLGIAQFITYCRVQGIQVVLVSSGSVAAGWHHFEGQAQPSVTVKKAMAAAGQADMMATWNKLFDFPTAQLLLTHGDLRNRERYISIRDTIFSLLEHGLMPIINENDAVTADKLKVGDNDNLSAMVAAAADADTLVICSDVDGLYDQNPHEHPNAKLIKQVTEINADIYAMAGGASSDVGTGGMRTKIQAAEKAISHGIETFIINGFNADSFSQLLKGQNPGTLFTPYEKPMQEHLHWMTHTSQAQGEVIVEDDFDLALDQHSEQLTSDDVVEVKGDFSVGDTILVRKGDGTKLAKAKSNYSSCLLSFITEQDDQAFASEFQQKTGPIISDKNIAILKSI

SEQ ID NO: 445 - DNA, 1104 bp, Unknown
  Obtained from metagenome sequencing
atgacagactctccccgtaaacgtattgtcgtcaaagtggggagcgccttaatcgcgccccacaagcaaggttgcagtagccattatctcttgggtatcgcgcagtttattacttactgccgtgtccaaggtatccaagtggtactggtttcatccggctcggttgccgctggttggcatcattttgagggccaagctcagcccagtgtcacagtgaaaaaggccatggcggccgcggggcaggcggatatgatggcgacgtggaataagctatttgattttcccaccgcccaactgctgctgacccatggcgacttacgtaatcgcgagcgttatatcagtattcgagacaccatttttagcctgctcgaacacggtttaatgccgatcatcaatgagaatgatgccgttaccgccgacaaacttaaggttggcgataacgataatctctcggccatggtggcggctgcggccgatgccgacaccttagtgatttgctcggatgtggatggactctatgatcaaaatccccacgaacatcccaatgccaagttgataaagcaagtcactgaaatcaatgccgatatctatgcgatggcgggaggcgccagcagcgatgttggtacaggaggcatgcgcactaagatccaagccgccgaaaaagccatctctcacggcattgagacctttattatcaatggctttaatgccgactcctttagccaactgctaaaggggcaaaatccgggcaccctctttaccccctacgaaaaaccgatgcaggagcatttgcattggatgacccacacctcgcaggcgcagggcgaagtgatcgtcgaggatgattttgacctcgcactcgatcagcacagcgagcaattaaccagcgatgatgtggttgaagtcaaaggggatttctcagtgggcgataccattctggtgcgtaaaggcgatggcactaagttggcgaaagccaaatctaactacagcagttgcctactgagttttattaccgagcaggatgatcaggcgtttgccagtgaattccagcaaaaaaccggccccatcatttccgataagaatatcgccattcttaaatccatt

SEQ ID NO: 446 - DNA, 1113 bp, Artificial sequence
  Codon optimised sequence
atgaccgatagtccgcgtaaacgtattgtggtgaaagttggtagtgccctgattgccccgcataaacagggctgtagtagtcattatctgctgggcattgcccagttcattacctattgtcgtgttcagggtattcaggtggttctggtgagtagtggtagcgttgccgccggttggcatcacttcgaaggccaggcccagccgagcgttaccgttaaaaaagccatggcagccgcaggtcaggccgatatgatggccacctggaataaactgttcgacttcccgaccgcccagctgctgctgacccatggtgatctgcgtaatcgtgaacgctatattagtattcgtgataccatcttcagtctgctggaacatggtctgatgccgattattaatgaaaatgatgcagtgaccgcagataaactgaaagtgggcgataatgataatctgagtgcaatggtggccgccgcagccgatgcagataccctggtgatctgtagcgatgtggatggcctgtatgatcagaatccgcatgaacatccgaatgccaaactgattaaacaggtgaccgaaattaatgcagatatctatgcaatggccggtggcgccagtagtgatgtgggcaccggtggcatgcgtaccaaaattcaggccgcagaaaaagccattagtcatggtattgaaaccttcattatcaatggcttcaatgcagatagcttcagccagctgctgaaaggtcagaatccgggtaccctgttcaccccgtatgaaaaaccgatgcaggaacatctgcattggatgacccataccagtcaggcccagggtgaagtgattgttgaagatgacttcgatctggccctggatcagcatagtgaacagctgaccagcgatgatgttgttgaagttaaaggcgacttcagcgttggcgataccattctggtgcgcaaaggtgatggcaccaaactggccaaagccaaaagcaattatagtagctgcctgctgagcttcattaccgaacaggatgatcaggcattcgccagtgagttccagcagaaaaccggcccgattattagcgataaaaatattgccattctgaagagcatttaaggatcc

SEQ ID NO: 447 - protein, 265 aa, Unknown
  Obtained from metagenome sequencing
MIPLTLIKLGGSIVTDKAKHEHYRGQHVREVAKLLSTYFTQRNEACLIGHGQGSFGHPAVKKNQQHFSDRSHFAPQAMAEMLRVVTHLHERILDDLVRERVPAISFRFSQQYVVDGAAEARVDLTLLEALLDLRMVPVTTGDILVDTEVGNRVLSTEKIFMALIRALQHSDKYRVERVAYVTQVAGVLDKAGKVIERIGADEEVDQSWFFAQADQADVTGAMKHKVEAAQAVAQLGIPVAILSANDPKNLDRYLRNQAWIGTRIA

SEQ ID NO: 448 - DNA, 795 bp, Unknown
  Obtained from metagenome sequencing
atgattcctcttaccttgatcaagcttggtggctcaatagtgaccgacaaagcgaagcacgagcactatcgcggtcagcatgttcgagaggtagccaaactattgtcaacatattttacccagcgaaatgaggcatgtttgattgggcatggccagggtagttttggtcacccagcggtgaaaaaaaaccagcagcatttttctgatcgatctcacttcgctccgcaagcgatggcagagatgttgcgagtggtcacccacttgcacgaacgtattttggatgacttagtccgtgaacgagtgcccgcaattagtttccgatttagccagcagtacgtggtggatggcgcagctgaggctcgggtcgacttgaccctcctcgaagcattgctcgatttgcgcatggtgcccgtaacgacgggtgatattttggttgataccgaggttggtaatcgggtgctttcgaccgaaaaaatttttatggcgttgattcgagcattgcagcattcagacaagtaccgagtcgagcgagtagcgtatgtgacacaagtagcaggagtgcttgacaaagcaggcaaggttatcgaacggattggcgctgatgaggaagtggatcaatcatggttctttgctcaagctgaccaggccgatgtgaccggagcgatgaaacataaggttgaggcggcgcaagcagtggctcaattaggtattcccgtagcaattttgtctgccaatgaccccaaaaatcttgatcgatatttacgcaatcaagcttggatcggtacacgaatagcg

SEQ ID NO: 449 - DNA, 804 bp, Artificial sequence
  Codon optimised sequence
atgatcccgctgaccctgattaaactgggcggcagtattgtgaccgataaagcaaaacatgaacattatcgcggccagcatgtgcgtgaagtggcaaaactgctgagcacctacttcacccagcgtaatgaagcatgtctgattggccatggccagggcagcttcggtcatccggccgtgaaaaaaaatcagcagcacttcagtgatcgcagtcacttcgccccgcaggcaatggccgaaatgctgcgcgttgttacccatctgcatgaacgtattctggatgatctggttcgcgaacgcgtgccggcaattagcttccgcttcagtcagcagtatgtggttgatggtgccgccgaagcccgcgtggatctgaccctgctggaagcactgctggatctgcgtatggtgccggttaccaccggtgatattctggtggataccgaagttggcaatcgcgttctgagtaccgaaaaaatcttcatggcactgattcgcgccctgcaacatagtgataaatatcgtgtggaacgcgttgcctatgtgacccaggtggccggtgttctggataaagccggtaaagttattgaacgtattggcgcagatgaagaagtggatcagagttggttcttcgcacaggccgatcaggcagatgtgaccggcgcaatgaaacataaagtggaagccgcacaggcagtggcacagctgggtattccggtggccattctgagtgccaatgatccgaaaaatctggatcgttatctgcgcaatcaggcctggattggtacccgtattgcataaggatcc

SEQ ID NO: 450 - protein, 276 aa, Unknown
  Obtained from metagenome sequencing
MGAGGHQNNADRTEKYAATTANKAKVTTPARISITRLYPVTFLQLCVKTCTMTKELVLLKLGGSLITDKDIPYTPRLDKLKELALEIKTVLDSNPELLLILGHGSGSFGHVAAKKHGTRDGVQTPEQWKGFAEVRFQAAELNPFVMESLFNAGVPAISFPPSSSMVSDDRKVIHHNILAIRKALNVHLLPVVYGDVAFDEKRGGTILSTEDVFTFLVDQFSPSRILLAGIEAGVWADFPARTKLVKQIQLSDYEKMRTSIGGSASTDVTGGMKAKV

SEQ ID NO: 451 - skipped

SEQ ID NO: 452 - DNA, 837 bp, Artificial sequence
  Codon optimised sequence
atgggcgctggtggtcatcagaataatgccgatcgtaccgaaaaatatgcagccaccaccgccaataaagccaaagtgaccaccccggcccgcattagtattacccgtctgtatccggttaccttcctgcaactgtgcgttaaaacctgtaccatgaccaaagaactggtgctgctgaaactgggtggcagcctgattaccgataaagatattccgtataccccgcgcctggataaactgaaagaactggccctggaaattaaaaccgttctggatagcaatccggaactgctgctgattctgggtcatggcagtggcagcttcggtcatgtggcagccaaaaaacatggtacccgcgatggtgttcagaccccggaacagtggaaaggcttcgccgaagtgcgcttccaggcagcagaactgaatccgttcgttatggaaagtctgttcaatgccggtgttccggcaattagcttcccgccgagcagcagcatggttagtgatgatcgcaaagttattcatcataatatcctggcaatccgtaaagcactgaatgtgcatctgctgccggtggtgtatggcgatgttgccttcgatgaaaaacgtggcggtaccattctgagcaccgaagatgtgttcaccttcctggttgatcagttcagcccgagccgtattctgctggcaggcattgaagccggcgtgtgggccgacttcccggcaagaaccaaactggttaaacagattcagctgagcgattatgaaaaaatgcgtaccagcattggcggcagcgcaagtaccgatgttaccggcggtatgaaagcaaaagtgtaaggatcc

SEQ ID NO: 453 - protein, 205 aa, Unknown
  Obtained from metagenome sequencing
MAAKQYQTIAGVHTREQWRGFAEVATVASELNYLVAREFSAAGVPVWRLQPSASAISRDGVLVSLALESPRQGLENGLVPLVYGNVALDEVRGGTIISTETIFFYMAKHLPVNRILLLGEVEGVMDSAGQVIPSITPAKFAAIQQYLGGSAGTDVTGGMVTKVQDMLTLAKQVSGLTIRIMDGRQPGLLFETLLGKVEPGTLISG

SEQ ID NO: 454 - skipped

SEQ ID NO: 455 - DNA, 624 bp, Artificial sequence
  Codon optimised sequence
atggcagcaaaacagtatcagaccattgccggtgtgcatacccgtgaacagtggcgtggcttcgcagaagtggccaccgttgcaagtgaactgaattatctggttgcacgcgagttcagtgccgcaggtgtgccggtgtggcgcctgcaaccgagtgccagcgcaattagccgtgatggcgtgctggttagtctggcactggaaagtccgcgtcagggcctggaaaatggtctggtgccgctggtgtatggtaatgttgccctggatgaagttcgtggcggcaccattattagcaccgaaaccatcttcttctatatggccaaacatctgccggttaatcgcattctgctgctgggcgaagttgaaggcgtgatggatagtgcaggccaggttattccgagtattaccccggccaaattcgccgcaattcagcagtatctgggcggtagtgccggcaccgatgttaccggcggcatggttaccaaagtgcaggatatgctgaccctggcaaaacaggttagcggtctgaccattcgtattatggatggccgtcagccgggtctgctgttcgaaaccttactgggcaaagttgaaccgggtaccctgattagtggctaaggatcc

SEQ ID NO: 456 - protein, 208 aa, Unknown
  Obtained from metagenome sequencing
MTIAKQCAEIAQMGVQLAIVVGGGNFIRGATFAEDGHIPRATADYMGMLATVINAVALQETMEKFGQPTRVLSAISVYSVCEPFIRRRAVRHLEKGRAIILAAGTGNPFFTTDTCAALRATEIAADVLLKATKVDGIYDKDPKKHPDTKLFNSISYDQVHNDKLRVMDLTAITLCMERKLPLVVFNMKKPGNIARVVLGENVGTKIQP

SEQ ID NO: 457 - skipped

SEQ ID NO: 458 - DNA, 633 bp, Artificial sequence
  Codon optimised sequence
atgaccattgcaaaacagtgtgcagaaattgcacagatgggcgttcagctggcaattgttgttggcggtggtaacttcattcgtggcgccaccttcgccgaagatggtcatattccgcgtgcaaccgcagattatatgggtatgctggcaaccgtgattaatgccgtggccctgcaagaaaccatggaaaaattcggccagccgacccgcgttctgagcgccattagtgtgtatagcgtgtgcgaaccgttcattcgccgtcgcgcagtgcgtcatctggaaaaaggtcgtgccattattctggccgccggtaccggcaatccgttcttcaccaccgatacctgcgcagcactgcgcgccaccgaaattgccgccgatgttctgctgaaagccaccaaagtggatggcatctatgataaagatccgaaaaaacatccggataccaaactgttcaatagcattagctatgatcaggttcataatgataagctgcgtgtgatggatctgaccgcaattaccctgtgtatggaacgtaaactgccgctggttgtgttcaatatgaaaaaaccgggtaatattgcacgcgttgtgctgggcgaaaatgttggtaccaaaattcagccgtaaggatcc

SEQ ID NO: 459 - protein, 218 aa, Unknown
  Obtained from metagenome sequencing
MADISIGPMSEKIDKLASSFQVKSKTVLKKSELWVVKAGSQMVIDGGPMLIRSWMSQVSELARQNHVQVIWVTSGAIASARKRTGKVPKLLREKQALSAIGQPHLINHYLVALQENDVSGAQILLTAEDLRSQARRTYLQQTLKTLLEWNFLPILNENDAVATEEIQFGDNDRLAALVAIHMKAKRLVLLTDVDGLYDRDPKTDASAKLVSELSGIPS

SEQ ID NO: 460 - skipped

SEQ ID NO: 461 - DNA, 663 bp, Artificial sequence
  Codon optimised sequence
atggccgatattagtattggtccgatgagcgaaaaaattgataaactggcaagtagcttccaggtgaaaagcaaaaccgttctgaaaaaaagtgaactgtgggttgttaaagcaggcagccagatggtgattgatggtggtccgatgctgattcgtagctggatgagtcaggtgagcgaactggcacgtcagaatcatgtgcaggttatctgggtgaccagtggcgcaattgcaagcgcacgcaaacgtaccggcaaagttccgaaactgctgcgtgaaaaacaggccctgagtgcaattggtcagccgcatctgattaatcattatctggtggcactgcaagaaaatgatgttagcggtgcacagattctgctgaccgcagaagacttacgtagccaggcccgtcgcacctatctgcaacagaccctgaaaaccttactggaatggaacttcctgccgattctgaatgaaaatgatgccgtggcaaccgaagaaattcagttcggtgataatgatcgcctggccgcactggttgccattcacatgaaagcaaaacgtctggtgctgctgaccgatgtggatggtctgtatgatcgtgatccgaaaaccgatgccagcgccaaactggtgagcgaattaagtggtattccgagttaaggatcc

SEQ ID NO: 462 - protein, 191 aa, Unknown
  Obtained from metagenome sequencing
MPPVSLPAPQSYAYTGLTKYLSRFSISNHYTIAMNTSTMTTKNVTMIKLGGSVITDKNVKDVFRREVLISLINDIKKFREENPDQLLIIGHGQGSFAHFPAKKYRTMEGFINEYSRYGMAVTQFTVGNLHQLVLEEMLGHELPVVSFRVNSAAVAKKSKMSYLAGEVLGEYLNQGLLPVTCGDVLVDSERG

SEQ ID NO: 463 - DNA, 573 bp, Unknown
  Obtained from metagenome sequencing
atgccgccggtttcgctccctgccccgcagtcatatgcatatacgggtttgacaaaatacttgagtagatttagcattagcaaccattatactatagcgatgaacacttctactatgaccacaaaaaatgtcacaatgattaaactgggcggatcggtaattacagataaaaatgttaaggatgttttccgccgggaagttttaataagtcttattaatgatatcaagaagttcagggaggaaaatccggaccaactgctgataatcgggcatggtcagggcagttttgctcattttccggcaaagaaatatcgcaccatggaagggtttatcaatgagtatagccgctatgggatggcggtgacacaatttacggtcggaaatctgcatcagctagttttggaggagatgctagggcatgaactaccggtcgtcagcttcagggtcaatagtgcggctgtggcaaaaaaatccaaaatgtcatatttggcaggagaagttttaggcgaatatttaaatcaagggctacttccagtaacctgcggcgatgttttagttgattcggaaagaggc

SEQ ID NO: 464 - DNA, 582 bp, Artificial sequence
  Codon optimised sequence
atgccgcctgtgagcctgccggcaccgcagagttatgcatataccggcctgaccaaatatctgagtcgcttcagtattagcaatcattataccattgcaatgaacaccagtaccatgaccaccaaaaatgttaccatgattaaactgggcggtagcgttattaccgataaaaatgtgaaagatgtgttccgtcgcgaagtgctgattagcctgattaatgatattaaaaagttccgtgaggagaatccggatcagctgctgattattggccatggtcagggcagcttcgcccacttcccggccaaaaaatatcgtaccatggaaggcttcattaatgaatatagtcgctatggtatggccgtgacccagttcaccgtgggtaatctgcatcagctggtgctggaagaaatgctgggccatgaactgccggttgtgagcttccgtgtgaatagcgccgccgttgcaaaaaaaagtaaaatgagctatctggcaggtgaagttctgggcgaatatctgaatcagggtctgctgccggtgacctgcggcgatgttctggttgatagtgaacgcggctaaggatcc

SEQ ID NO: 465 - protein, 193 aa, Unknown
  Obtained from metagenome sequencing
MNRIVVGEMLKQNIPAVTQQSASLFSLANRDAKPDISLKIVQSLLGGGFVPVVYGDVLFTQDGNFTIYSTEKVLNNLALALRESGETIGKVIHCGETDGFLKDGQVVSIITPETHQEMLASMDKAKGFDVTGGMEHKVEMALNLAHDGIDSFIVGNNHGGNLYRTIVGKEYIGTRIHWLHKCLTIMRCMCDRI

SEQ ID NO: 466 - skipped

SEQ ID NO: 467 - DNA, 588 bp, Artificial sequence
  Codon optimised sequence
atgaaccgtattgttgttggcgaaatgctgaaacagaatattccggccgttacccagcagagcgcaagtctgttcagtctggccaatcgtgatgcaaaaccggatattagcctgaaaattgtgcagagtctgctgggtggcggcttcgtgccggtggtgtatggtgatgtgctgttcacccaggatggcaacttcaccatctatagtaccgaaaaagttctgaataacctggccctggcactgcgtgaaagcggcgaaaccattggcaaagttattcattgtggtgaaaccgatggcttcctgaaagatggtcaggtggttagcattattaccccggaaacacatcaggaaatgctggcaagtatggataaagccaaaggcttcgatgtgaccggtggtatggaacataaagttgaaatggccctgaatctggcacatgatggtattgatagcttcattgtgggtaataatcatggcggcaatctgtatcgcaccattgtgggtaaagaatatattggtacccgtattcattggctgcataaatgtctgaccattatgcgttgcatgtgcgatcgtatttaaggatcc

SEQ ID NO: 468 - protein, 289 aa, Unknown
  Obtained from metagenome sequencing
MALIVMKFGGTSVADVEKIENAADKVVKEVERGHKVAVVVSAMSGVPNQLVGYCSEISSLHDVREYDTVVASGEQVTAGLMAMALQKRGVTARSWLGWQIPIKTNSIHGKARIEEIETKELHKRLDAGEVLVVPGFQGVTKNKRITTLGRGGSDTSAVALAAALKADRCDIYTDVKGVYTADPRIVPKAKMIPKISYEEMLELASLGSKVLQTRSVEMGAKSGVPIQVLSTFEPYLGSDLKGTLVTKEENIVEQEIVSGIAHNKDEAKVTVVGVEDKPGIAASLFEPLA

SEQ ID NO: 469 - skipped

SEQ ID NO: 470 - DNA, 876 bp, Artificial sequence
  Codon optimised sequence
atggccctgattgttatgaaattcggtggtaccagcgtggcagatgttgaaaaaattgaaaatgcagccgataaagttgttaaagaagttgaacgcggtcataaagttgcagtggtggtgagcgcaatgagtggcgttccgaatcagctggttggctattgcagcgaaattagcagtctgcatgatgttcgtgaatatgataccgttgttgccagtggcgaacaggtgaccgcaggtctgatggcaatggccctgcaaaaacgcggtgtgaccgcacgcagttggctgggttggcagattccgattaaaaccaatagcattcatggtaaagcacgcattgaagaaattgaaaccaaagaactgcataaacgtctggatgccggcgaagtgctggttgttccgggcttccagggtgtgaccaaaaataaacgtattaccaccctgggtcgtggtggcagtgataccagcgcagttgcactggcagcagcactgaaagcagatcgttgtgatatctataccgatgttaaaggtgtgtataccgcagatccgcgtattgtgccgaaagcaaaaatgattccgaaaattagctacgaagaaatgctggaactggccagcctgggtagcaaagttctgcaaaccagaagcgttgaaatgggcgcaaaaagcggcgtgccgattcaggtgctgagtaccttcgaaccgtatctgggtagcgatctgaaaggtaccctggttaccaaagaagaaaatattgttgaacaggaaatcgttagcggtattgcccataataaagatgaagccaaagtgaccgttgttggcgttgaagataaaccgggtattgcagccagtctgttcgaaccgctggcataaggatcc

SEQ ID NO: 471 - protein, 222 aa, Unknown
  Obtained from metagenome sequencing
MSSRGLGDVYKRQLKLGAMPIINENDSVTTNEIRFGDNDSLSAWVAHLMGADALILLTDVDGLFDSDPRFNKHAKVIKDVHNIADVKHLAGHAGTQRGTGGMVTKLRAAELATVAGTETLIIGGGGPGLEALAKGEIRGTRFYAKTSPSARKSWLAQLPLRGSIEIDAGAAKALSRGNSLLPKGITVIDGHFDFGDAVAVTHNGACVARGLSNYPSAALKKI

SEQ ID NO: 472 - skipped

SEQ ID NO: 473 - DNA, 675 bp, Artificial sequence
  Codon optimised sequence
atgagtagtcgcggcctgggcgatgtgtataaacgccagctgaaactgggcgccatgccgattattaatgaaaatgatagcgttaccaccaatgaaattcgcttcggtgataatgatagcctgagcgcatgggttgcccatctgatgggtgccgatgcactgattctgctgaccgatgttgatggtctgttcgatagcgatccgcgcttcaataaacatgccaaagttattaaagacgtgcataatattgccgatgttaaacatctggcaggtcatgccggcacccagcgtggcaccggtggtatggttaccaaactgcgtgccgcagaactggcaaccgtggccggtaccgaaaccttaattattggcggcggcggcccgggtctggaagcattagcaaaaggcgaaattcgcggcacccgcttctatgcaaaaaccagcccgagcgcccgtaaaagctggctggcacagctgccgctgcgtggcagcattgaaattgatgccggcgcagccaaagcactgagtcgtggtaatagcctgctgccgaaaggcattaccgtgattgatggccacttcgacttcggtgatgcagttgcagtgacccataatggtgcatgcgttgcacgcggcctgagcaattatccgagcgccgccctgaaaaaaatttaaggatcc

SEQ ID NO: 474 - protein, 331 aa, Unknown
  Obtained from metagenome sequencing
MSLPNAGHARRIVVKLGTGVLTSGIGQLDTDRIGSIARGIASLRQRGTEVIVVSSGAVGLGMGALKLQKKPKDVSKKQACAAIGQSRLMQTWQNAFSPLNLTVAQVLLTHEDLRSRTRYLGVKECLQQLIAYGTIPIINENDTVSAAEIKFGDNDTLSAMVASLTEATHLAILSTAPGLIDMKGTGQIIPVVERITPEIEAMAGGTTSETATGGMISKISAARLATQAGCGVFIASGAEPDILNKLLSGTGPGTFFVPSGLPLEAKKRWLAYFQRPSGTLLVNTCAVPVLRDQGRSLLAVGVTGAKGQFQSGDIVNIAAPDGTIFARGKTA

SEQ ID NO: 475 - skipped

SEQ ID NO: 476 - DNA, 1002 bp, Artificial sequence
  Codon optimised sequence
atgagtctgccgaatgccggccatgcacgccgtattgtggtgaaactgggcaccggtgttctgaccagcggtattggtcagctggataccgatcgcattggcagcattgcccgcggtattgcaagtctgcgtcagcgcggcaccgaagttattgtggttagcagtggtgccgtgggtctgggtatgggcgcactgaaactgcaaaaaaaaccgaaagatgttagtaaaaagcaggcatgcgcagccattggccagagccgtctgatgcagacctggcagaatgcattcagcccgctgaatctgaccgttgcccaggttctgctgacccatgaagacttacgcagccgcacccgctatctgggtgttaaagaatgcctgcaacagctgattgcctatggcaccattccgattattaatgaaaatgataccgtgagtgcagccgaaattaaattcggcgataatgataccctgagtgccatggttgccagcctgaccgaagccacccatctggccattctgagcaccgccccgggcctgattgatatgaaaggtaccggtcagattattccggtggtggaacgtattaccccggaaattgaagccatggccggtggcaccaccagcgaaaccgcaaccggcggcatgattagcaaaattagcgccgcacgtctggcaacccaggccggttgcggcgtgttcattgccagtggcgccgaaccggatattctgaataaactgctgagcggcaccggtccgggcaccttcttcgtgccgagtggcctgccgctggaagccaaaaaacgttggctggcatacttccagcgtccgagtggcaccctgctggtgaatacctgtgcagttccggttctgcgtgatcagggtcgcagcctgctggcagtgggtgttaccggcgccaaaggccagttccagagcggtgatattgtgaatattgcagccccggatggtaccatcttcgcccgtggcaaaaccgcctaaggatcc

SEQ ID NO: 477 - protein, 257 aa, Methanococcus vannielii
MFAILKLGGSILCDKNVPYSINWENLQNIGIEIKEALEYYRKEEINLKLIIVHGGGSFGHPVAKKYLKNGKFVDMGKGYWEIQKAMRKFNNIVIDELQNFEIPVVSIQPSSFITFDKDLNLRFDTNAIEKMLEKDLIPVIHGDIVIDERENNFKIFSGDHALPHLSKKLNPDLSLHASDVDGVWDTKFKVIEKIDSSNINKVLESLKPSNKEDVTGGMHLKVMECYNLGVKTIIFNGSKKRNIYNALLKNVKGTSIN

SEQ ID NO: 478 - DNA, 774 bp, Methanococcus vannielii
atgtttgcaattttaaaacttggcggaagtatcctttgcgataaaaatgttccatattcaattaattgggaaaatttacagaatattggaatcgaaataaaagaagcccttgaatattacagaaaagaagaaataaacctaaaattaattattgttcacggaggaggctcttttggccatcctgttgctaaaaaatatttaaaaaatggaaaatttgtagatatgggcaaaggatactgggaaattcaaaaagcaatgagaaaattcaacaatatcgtaattgatgaactacaaaattttgaaattccggtagtttcaatacagccctcctcatttatcacttttgacaaagatttaaacttacgttttgacacaaatgctattgaaaagatgcttgaaaaagatttaattcccgtaattcacggggatattgtaattgatgaaagggaaaataatttcaagatattttctggagaccatgcactcccccacctttcaaaaaaactaaatcctgatctgagtcttcatgcatccgacgttgatggtgtatgggatactaaatttaaggtaattgaaaaaatagattcatcaaatattaataaagtgctagaatcgttaaaaccttcaaacaaagaagatgtaaccggaggaatgcacttaaaagtaatggaatgttataatttaggcgttaaaaccataatttttaatggaagtaaaaaaagaaatatatataatgcccttttaaaaaatgtaaaaggaacttcaataaattaa

SEQ ID NO: 479 - DNA, 780 bp, Artificial sequence
  Codon optimised sequence
atgttcgccattctgaaactgggcggcagtattctgtgcgataaaaatgtgccgtatagcattaattgggaaaatctgcaaaacattggcattgaaattaaggaagcactggaatattaccgcaaagaagaaattaatctgaagctgattatcgtgcatggcggcggtagcttcggccatccggtggcaaaaaaatatctgaaaaatggtaagttcgtggatatgggcaaaggctattgggaaattcagaaagcaatgcgcaaattcaataatattgtgattgacgaactgcaaaacttcgaaattccggttgtgagtattcagccgagtagcttcattaccttcgataaagacttaaatctgcgcttcgataccaatgccattgaaaaaatgctggaaaaagacttaatcccggtgattcatggcgatattgtgattgatgaacgtgaaaataacttcaaaatcttcagtggcgatcatgcactgccgcatctgagtaaaaaactgaatccggatctgagcctgcatgcaagcgatgtggatggtgtgtgggataccaaattcaaagtgattgaaaaaatcgacagcagtaatattaacaaggtgctggaaagcctgaaaccgagtaataaagaagatgtgaccggtggtatgcatctgaaagttatggaatgttataacctgggcgtgaaaaccattatcttcaatggcagcaaaaaacgcaatatctataatgccctgctgaaaaatgtgaaaggtaccagcattaattaaaagctt

SEQ ID NO: 480 - protein, 257 aa, Methanococcoides burtonii
MNSNNGITILKIGGSVITDKRSEDGLAWEEEIVRIAREISGFEGKLIIVHGAGSYGHPQAKRYALTEGFHAEGAVVTHNAVKALNRIVVGILNDEGVNAISVHPMCCTVAKNGRISDMYLGSIRLMLEKGLVPVLHGDVVMDEVKGVSIISGDQVIPYLATQLKASRIGVGSAADGVFDDKGVTIPVITSMNFDEIKAYIGGSAGTDVTGGMLGKVLEMLELGKTSSITSYIFNATVVGSVSSFLNGENIGTAIKDS

SEQ ID NO: 481 - DNA, 774 bp, Methanococcoides burtonii
gtgaactcaaataacgggataactatattgaagataggcggcagcgtaattaccgataagagatcggaagacgggcttgcctgggaagaagagatagtccggatagctcgtgaaatatccggttttgaaggtaaacttatcattgtgcatggtgcaggttcctacggtcaccctcaggcaaaaagatatgctcttacggaaggcttccatgcagaaggggctgttgtcactcacaatgcagtaaaggcattgaaccgtatcgtagttggaattctcaatgatgaaggtgtgaatgcgatatcagtacatccaatgtgttgcacggtcgcaaagaacggtcgcatctcggacatgtatcttggaagtatcaggttgatgcttgagaaagggcttgttccggtattacatggtgatgttgtaatggatgaggtaaaaggcgtatccatcatctccggtgatcaggtgataccctatcttgcaacacagttgaaggcttccagaattggagttgggagtgcagcagatggtgtgttcgatgataagggcgtaaccattccagtgatcacttctatgaatttcgatgagataaaggcatatatcggtggctcggcaggaactgatgtgaccggtggaatgctcgggaaagtgcttgaaatgctggaacttggcaaaacatcaagtataacctcctatatattcaatgcaactgtagtgggaagcgtgtcgagttttctaaatggtgagaacatcggtaccgcaataaaagattcataa

SEQ ID NO: 482 - DNA, 780 bp, Artificial sequence
  Codon optimised sequence
atgaacagtaacaacggtattaccattctgaaaattggtggtagcgttattaccgataaacgtagcgaagatggtctggcatgggaagaagaaattgtgcgtattgcacgcgaaattagtggcttcgaaggcaaactgattattgtgcatggtgccggtagttatggtcatccgcaggccaaacgttatgccctgaccgaaggcttccatgcagaaggtgccgtggttacccataatgcagttaaagcactgaatcgcattgttgttggcattctgaatgatgaaggtgttaatgcaattagcgtgcatccgatgtgttgcaccgttgccaaaaatggtcgtattagcgatatgtatctgggtagcattcgtctgatgctggaaaaaggcctggtgccggttctgcatggtgatgtggtgatggatgaagttaaaggcgttagcattattagcggtgatcaggtgattccgtatctggccacccagctgaaagcaagtcgtattggtgtgggcagtgcagcagatggtgtgttcgatgataaaggcgttaccattccggttattaccagcatgaacttcgatgaaattaaagcatatatcggtggtagcgcaggcaccgatgtgaccggtggtatgctgggtaaagtgctggaaatgctggaactgggcaaaaccagcagcattaccagctatatcttcaatgccaccgttgtgggcagcgtgagtagcttcctgaatggcgaaaatattggtaccgcaattaaagatagttaaaagctt

SEQ ID NO: 483 - protein, 258 aa, Methanolobus tindarius
MDNNNITILKIGGSVITDKSADDGTARLSEIERIAAEISGFEGKLIIVHGAGSFGHPQVKRFGLTGKFDHEGSIITHMSVRKLNTMVVETLNSAGINALPVHPMACAISSNSRIKSMFREQIEEMLANGFVPVLHGDMVMDTDLGTSVLSGDQIVPYLAIQMKASRIGIGSAEEGVLDDKGGVIPLINNENFDEIKAYLSGSANTDVTGGMLGKVLELLELSEQSNSTSYIFNAGNTGNISDFLSGKNIGTAIGAGTI

SEQ ID NO: 484 - DNA, 777 bp, Methanolobus tindarius
atggataacaataatattactatcctgaagataggcggtagtgtcatcacagataaaagtgctgatgatggtactgcaagattaagtgaaatagaaagaatagcagctgagatctcaggttttgaaggaaaacttatcattgtacatggtgcaggatcattcggacatccgcaggtcaaacgtttcggacttaccggtaaatttgaccacgaaggttccataattacacacatgtcagtaaggaaactcaacacaatggttgttgaaaccttaaactctgcaggaattaacgcattgccagtacatcctatggcatgtgcaatatcaagcaacagccgcataaagagtatgttccgtgaacaaatagaggaaatgcttgctaatggatttgtacccgttcttcatggcgacatggtaatggacaccgaccttgggacttcggtcctgtccggtgatcagattgttccgtatcttgcaatacagatgaaagcatcaagaatcggaattggaagtgcggaagaaggtgtgcttgatgacaaaggaggagtaatacccctaatcaacaacgaaaattttgatgaaattaaggcatatctcagtggttctgctaacaccgatgttaccggcggaatgctgggaaaagtacttgagcttttagaactaagtgagcagtcaaacagcacttcttatatatttaatgcaggcaatacaggaaacatatcagatttcctcagtggtaagaatattggtaccgcaataggagccgggactatataa

SEQ ID NO: 485 - DNA, 783 bp, Artificial sequence
  Codon optimised sequence
atggataacaacaacatcaccattctgaaaattggcggcagtgttattaccgataaaagcgcagatgatggtaccgcacgcctgagtgaaattgaacgcattgcagcagaaattagtggcttcgaaggtaaactgattattgtgcatggcgcaggcagcttcggccatccgcaggtgaaacgcttcggcctgaccggcaaattcgatcatgaaggtagtattattacccacatgagcgttcgtaaactgaataccatggtggtggaaaccttaaatagtgcaggtattaatgccctgccggttcatccgatggcctgtgcaattagtagtaatagtcgtattaagagcatgttccgcgaacagattgaagaaatgctggcaaatggcttcgttccggttctgcatggtgatatggtgatggataccgatctgggtaccagcgttctgagtggtgatcagattgtgccgtatctggccattcagatgaaagcaagtcgcattggcattggtagcgcagaagaaggcgtgctggatgataaaggcggcgtgattccgctgattaataatgaaaacttcgatgaaatcaaggcctatctgagcggcagtgccaataccgatgttaccggtggcatgctgggcaaagttctggaactgctggaactgagtgaacagagtaatagcaccagctatatcttcaatgcaggtaataccggtaatattagcgacttcctgagcggtaaaaatattggtaccgcaattggcgccggcaccatttaaaagctt

SEQ ID NO: 486 - protein, 332 aa, Arabidopsis thaliana
MELNISESRSRSIRCIVKLGGAAITCKNELEKIHDENLEVVACQLRQAMLEGSAPSKVIGMDWSKRPGSSEISCDVDDIGDQKSSEFSKFVVVHGAGSFGHFQASRSGVHKGGLEKPIVKAGFVATRISVTNLNLEIVRALAREGIPTIGMSPFSCGWSTSKRDVASADLATVAKTIDSGFVPVLHGDAVLDNILGCTILSGDVIIRHLADHLKPEYVVFLTDVLGVYDRPPSPSEPDAVLLKEIAVGEDGSWKVVNPLLEHTDKKVDYSVAAHDTTGGMETKISEAAMIAKLGVDVYIVKAATTHSQRALNGDLRDSVPEDWLGTIIRFSK

SEQ ID NO: 487 - DNA, 2520 bp, Arabidopsis thaliana
aaaaaaagagagaatctttccggtgaatgggaaatggcaagaagaaggatacgagtacgatgaagttgagttagagcgggagagagagacataccgttgaccactaaagacgagagctttagagagagacgcaacaatggagctgaatatttccgagagtcgaagcagatcaattcgttgcattgtgaaacttggtttgtcttttgatccctattaaaatacttgctggatcgattcttagatcgcattttagttgttctgtcttatgggtttgattctgatttgactattgaataccgaagatgaggaaagactttaaagatctgtcttttattcatttcccatcaattttacctgtctagactttgtaacagcagaatgtctaaatgatttgataggaggtgcggcaattacttgcaaaaacgagctggagaagattcacgatgaaaatctggaggtcgtggcgtgtcagttacgtcaagctatgttggagggttcagctccaagcaaggttattggcatggattggagcaagagacctggaagctctgagatttcttgtgatgtggatgacataggggatcaaaagtcttctgagtttagtaaatttgttgtggttcatggcgctggttagttggagattgattcttatctgcttaaatcttataatgaaggatcaaaatacatttttgatttagctcttacagatcattgacctgcttgtgttagttgagctgttatttagtttttgggtttcttatgtgttgttctgatttttgtcattaggttcctttgggcactttcaggccagtagatctggggttcacaaaggaggacttgagaaacctattgtcaaagctggtttcgttgctactcgtatatctgtgagactgttagctaaatctgatgctcttacgtaagatagtcttgagctgttctgatagtctacaacttctttttgcaggtgacaaatcttaatcttgaaattgtacgagcactagcccgaggtatctcttaagcttattctcttttcctactctggctaagaggaaaagatgaattttgaagctaaacattatgatctcttgcagagggcattcctacgataggcatgtctccattttcatgtggttggtcaacctccaaaagagatgtaagagctaactgaacttcttaacatatttcctgatctgaagcatgtgggtttagatttcaatgagactgctttttgcattaggtggcttctgcagatctagcaaccgtagctaaaaccatagactcaggatttgtccctgtaagttttgatcccaccagtgaaattaggtagatgtttaccaaagtctcttgactgtaatttggacagtaatttttgtcatggccaggttctccatggagatgcagtgctggacaatatactggtaatatgctctccagagataccaaatagctatctagattcttgtccgtttagaatttgaacagttgaaaatcttgtcctgaacagggctgcaccatattgagtggtgatgttatcatccgtcatcttgcagatcatttgaagccagaatatgttgtctttctcgtatcctattcatagtataaaccggaaatttaatttgtgttctctctccctctttcctatatattctttgttatctgagtaactctttacaaagacagatgtactaggtgtctacgatcgaccaccttcaccttcagagcccgacgctgtgctcttgaaagagatcggttagtttcaaactttactgtttgttttttttatatcttttccagacttggcctgatactaacagttcatgcagctgttggagaagatggaagctggaaggttgtgaatccactgttggagcacacagacaagaaaggtaaacgaaagaaccaatgttgtaaaactatgcaatacaataagtctgagggatttgttaaaagttcaaacctctctgatttttggaatcaaacagttgactactctgttgcggcgcacgatacaaccggtggaatggaaacgaagatatcagaagctgctatgattgcaaaacttggagtcgatgtctacattgtgaaggtagattatagacaacttttgcctttaaccaactaaatatcttagataaagatggagcttttaaccgccatcatgctctttttttcaatctcctcaaacaggctgcgacaactcattcacagagagcactaaacggtgatttgagagatagtgttcctgaagattggcttggtactatcatcagattctcaaagtagaataatctcctgacaaatacactaattccagttcctcaacaaaggaaagcattgaccttttcttgctattactgttttaccagactttgtgcaaggaatacaaaatcgtgtaatgtcaaaaccagttaaaatgtcgaatactatcgcagcctgtgtaactctatgtttccacaagtattcaatcacatatcttacactgttattgttaaataaaatgtatatgtcactcttgaatcg

SEQ ID NO: 488 - DNA, 1009 bp, Artificial sequence
  Codon optimised sequence
atggaactgaatatcagcgaaagccgtagtcgtagcattcgttgtattgttaaactgggtggtgcagcaattacctgtaaaaatgaactggaaaaaatccatgacgaaaatctggaagttgttgcatgtcagctgcgccaggccatgctggaaggtagcgccccgagtaaagttattggtatggattggagtaaacgcccgggcagtagtgaaattagttgtgatgttgatgatatcggcgatcagaaaagcagtgaattttcaaaattcgtggtggttcatggcgcaggtagctttggccattttcaggcaagtcgtagtggtgttcataaaggtggcctggaaaaaccgattgttaaagccggctttgttgccacccgcattagcgttaccaatctgaatctggaaattgttcgtgccctggcacgtgaaggcattccgaccattggcatgagcccgtttagctgtggctggagtaccagcaaacgtgatgttgccagcgccgatctggcaaccgtggcaaaaaccattgatagtggttttgtgccggtgctgcatggcgatgccgttctggataatattctgggctgtaccattctgagcggcgatgttattattcgtcatctggccgatcatctgaaaccggaatatgttgtttttctgaccgatgttctgggtgtttatgatcgcccgccgagtccgagcgaaccggatgctgttctgctgaaagaaattgccgtgggtgaagatggcagttggaaagttgttaatccgctgctggaacataccgataaaaaagtggattatagtgtggccgcacatgataccaccggtggtatggaaaccaaaattagtgaagccgccatgattgccaaactgggcgttgatgtgtatattgttaaagcagccaccacccatagccagcgtgcactgaatggcgatctgcgtgatagtgtgccggaagattggctgggtaccattattcgctttagcaaatgactgaaagctt

SEQ ID NO: 489-490 - skipped (2 entries)

SEQ ID NO: 491 - DNA, 5275 bp, Artificial sequence
  Plasmid
ggggaattgtgagcggataacaattcccctgtagaaataattttgtttaactttaataaggagatataccatgctgaccattctgaaactgggtggtagcattctgagtgataaaaatgtgccgtatagtattaagtgggataatctggaacgcattgcaatggaaattaaaaatgcactggattattacaagaaccagaataaagaaatcaagctgattctggtgcatggtggtggtgccttcggccatccggttgcaaaaaaatatctgaaaattgaagacggtaagaagatcttcattaatatggaaaagggcttctgggaaattcagcgtgccatgcgtcgcttcaataatattattattgacaccctgcaaagctatgatattccggccgtgagtattcagccgagtagcttcgtggtgttcggcgataaactgatcttcgataccagtgccattaaagaaatgctgaaacgtaatctggtgccggtgattcatggcgatattgtgattgatgataaaaatggttaccgtattatcagtggtgatgatattgttccgtatctggccaatgaactgaaagccgatctgattctgtatgcaaccgatgttgatggcgtgctgattgataataaaccgattaaacgcattgacaaaaacaatatctataagatcctgaactacctgagtggtagcaatagtattgatgtgaccggtggtatgaaatataaaattgatatgatccgcaagaacaagtgtcgcggcttcgtgttcaatggcaataaagcaaataatatctacaaggccctgctgggcgaagttgaaggcaccgaaattgacttcagtgaatgagcggccgcataatgcttaagtcgaacagaaagtaatcgtattgtacacggccgcataatcgaaattaatacgactcactataggggaattgtgagcggataacaattccccatcttagtatattagttaagtataagaaggagatatacatatgagcaaagttatcaccgatgtgttctataccgccttcaaaaccgccctgccgctgaccagtagtccgctggttcagtgtattaccaatgaaattaccgttgaaagcatggccaatgccctgctgtatattgatgccaaaccggttatggcagatgatcagcgcgagttcccggagttcttcgcccagagcgatgcactgctgctgaatctgggccatattagtgaagtgcgccagcagaatctgctggcagcaggtaaattcgcccaggcaaccaatcagccgaccgtgattgatctggtgggtgttagtgcaacccagctgcgttatgatctgggccatcagctgctggcaaatcatccgaatgtggtgaaaggtaatattagtgaaatgcgccgcttcgccgatctgaaaagtaccggtcgcggtgtggatggtagccagctggatcagagtgcaaccgcactgggcgaactggccgccagcctgcaacagctgacccaggcattcccgaccaccaccttcctggcaaccggtaaaattgatctggttgtgagcgcaaaaggcacctggtatctgaaaaatggtgttccgcagctggatcgcttcaccggcaccggtgatattgtgggtgccctgattgccgcactgctgggtaccggcctggataatgatgcagccgttgtggtggcagtgagttacttcaattgctgtggtgaagttgcagccgcacagaatcgcaccggcggtctggcagccttccgcgaaggtaccctgaatcagctgagtctgctggcagccaccgccgattggctgcaaatggttaaaggtgaagcactgtgactcgagtctggtaaagaaaccgctgctgcgaaatttgaacgccagcacatggactcgtctactagcgcagcttaattaacctaggctgctgccaccgctgagcaataactagcataaccccttggggcctctaaacgggtcttgaggggttttttgctgaaacctcaggcatttgagaagcacacggtcacactgcttccggtagtcaataaaccggtaaaccagcaatagacataagcggctatttaacgaccctgccctgaaccgacgaccgggtcatcgtggccggatcttgcggcccctcggcttgaacgaattgttagacattatttgccgactaccttggtgatctcgcctttcacgtagtggacaaattcttccaactgatctgcgcgcgaggccaagcgatcttcttcttgtccaagataagcctgtctagcttcaagtatgacgggctgatactgggccggcaggcgctccattgcccagtcggcagcgacatccttcggcgcgattttgccggttactgcgctgtaccaaatgcgggacaacgtaagcactacatttcgctcatcgccagcccagtcgggcggcgagttccatagcgttaaggtttcatttagcgcctcaaatagatcctgttcaggaaccggatcaaagagttcctccgccgctggacctaccaaggcaacgctatgttctcttgcttttgtcagcaagatagccagatcaatgtcgatcgtggctggctcgaagatacctgcaagaatgtcattgcgctgccattctccaaattgcagttcgcgcttagctggataacgccacggaatgatgtcgtcgtgcacaacaatggtgacttctacagcgcggagaatctcgctctctccaggggaagccgaagtttccaaaaggtcgttgatcaaagctcgccgcgttgtttcatcaagccttacggtcaccgtaaccagcaaatcaatatcactgtgtggcttcaggccgccatccactgcggagccgtacaaatgtacggccagcaacgtcggttcgagatggcgctcgatgacgccaactacctctgatagttgagtcgatacttcggcgatcaccgcttccctcatactcttcctttttcaatattattgaagcatttatcagggttattgtctcatgagcggatacatatttgaatgtatttagaaaaataaacaaatagctagctcactcggtcgctacgctccgggcgtgagactgcggcgggcgctgcggacacatacaaagttacccacagattccgtggataagcaggggactaacatgtgaggcaaaacagcagggccgcgccggtggcgtttttccataggctccgccctcctgccagagttcacataaacagacgcttttccggtgcatctgtgggagccgtgaggctcaaccatgaatctgacagtacgggcgaaacccgacaggacttaaagatccccaccgtttccggcgggtcgctccctcttgcgctctcctgttccgaccctgccgtttaccggatacctgttccgcctttctcccttacgggaagtgtggcgctttctcatagctcacacactggtatctcggctcggtgtaggtcgttcgctccaagctgggctgtaagcaagaactccccgttcagcccgactgctgcgccttatccggtaactgttcacttgagtccaacccggaaaagcacggtaaaacgccactggcagcagccattggtaactgggagttcgcagaggatttgtttagctaaacacgcggttgctcttgaagtgtgcgccaaagtccggctacactggaaggacagatttggttgctgtgctctgcgaaagccagttaccacggttaagcagttccccaactgacttaaccttcgatcaaaccacctccccaggtggttttttcgtttacagggcaaaagattacgcgcagaaaaaaaggatctcaagaagatcctttgatcttttctactgaaccgctctagatttcagtgcaatttatctcttcaaatgtagcacctgaagtcagccccatacgatataagttgtaattctcatgttagtcatgccccgcgcccaccggaaggagctgactgggttgaaggctctcaagggcatcggtcgagatcccggtgcctaatgagtgagctaacttacattaattgcgttgcgctcactgcccgctttccagtcgggaaacctgtcgtgccagctgcattaatgaatcggccaacgcgcggggagaggcggtttgcgtattgggcgccagggtggtttttcttttcaccagtgagacgggcaacagctgattgcccttcaccgcctggccctgagagagttgcagcaagcggtccacgctggtttgccccagcaggcgaaaatcctgtttgatggtggttaacggcgggatataacatgagctgtcttcggtatcgtcgtatcccactaccgagatgtccgcaccaacgcgcagcccggactcggtaatggcgcgcattgcgcccagcgccatctgatcgttggcaaccagcatcgcagtgggaacgatgccctcattcagcatttgcatggtttgttgaaaaccggacatggcactccagtcgccttcccgttccgctatcggctgaatttgattgcgagtgagatatttatgccagccagccagacgcagacgcgccgagacagaacttaatgggcccgctaacagcgcgatttgctggtgacccaatgcgaccagatgctccacgcccagtcgcgtaccgtcttcatgggagaaaataatactgttgatgggtgtctggtcagagacatcaagaaataacgccggaacattagtgcaggcagcttccacagcaatggcatcctggtcatccagcggatagttaatgatcagcccactgacgcgttgcgcgagaagattgtgcaccgccgctttacaggcttcgacgccgcttcgttctaccatcgacaccaccacgctggcacccagttgatcggcgcgagatttaatcgccgcgacaatttgcgacggcgcgtgcagggccagactggaggtggcaacgccaatcagcaacgactgtttgcccgccagttgttgtgccacgcggttgggaatgtaattcagctccgccatcgccgcttccactttttcccgcgttttcgcagaaacgtggctggcctggttcaccacgcgggaaacggtctgataagagacaccggcatactctgcgacatcgtataacgttactggtttcacattcaccaccctgaattgactctcttccgggcgctatcatgccataccgcgaaaggttttgcgccattcgatggtgtccgggatctcgacgctctcccttatgcgactcctgcattaggaaattaatacgactcactata

1. An isolated kinase 1 capable of catalysing a reaction from isoprenol and/or prenol to isopentenylphosphate and/or dimethylallyl phosphate or a salt thereof in an aqueous medium comprising water, kinase 1 and isoprenol and/or prenol, wherein after incubation at least 10% of the isoprenol and/or prenol have been converted to isopentenylphosphate or a salt thereof and/or dimethylallyl phosphate or a salt thereof

2. The isolated kinase 1 of claim 1 wherein after incubation at least 20% of the isoprenol and/or prenol have been converted to isopentenylphosphate or a salt thereof and/or dimethylallyl phosphate or a salt thereof.

3. The isolated kinase 1 of claim 1 comprising a sequence selected from the group consisting of
a. The amino acid molecule of SEQ ID NO: 43, 46, 49, 52, 123, 126, 135, 138, 144, 150, 153, 324, 351, 357, 375, 378, 390, or 393,
b. An amino acid molecule having at least 50% identity to the amino acid molecule of SEQ ID NO: 43, 46, 49, 52, 123, 126, 135, 138, 144, 150, 153, 324, 351, 357, 375, 378, 390, or 393, or a functional fragment thereof,
c. An amino acid molecule encoded by a nucleic acid molecule of SEQ ID NO: 44, 45, 47, 48, 50, 51, 53, 54, 124, 127, 136, 139, 145, 151, 154, 325, 358, 379, 394, 125, 128, 137, 140, 146, 152, 155, 326, 353, 359, 377, 380, 392, or 395 or a functional fragment thereof,
d. An amino acid molecule encoded by a nucleic acid molecule having at least 50% identity to SEQ ID NO: 44, 45, 47, 48, 50, 51, 53, 54, 124, 127, 136, 139, 145, 151, 154, 325, 358, 379, 394, 125, 128, 137, 140, 146, 152, 155, 326, 353, 359, 377, 380, 392, or 395 or a functional fragment thereof, and
e. An amino acid molecule encoded by a nucleic acid molecule hybridizing under stringent conditions to a fragment of at least 250 bases complementary to SEQ ID NO: 44, 45, 47, 48, 50, 51, 53, 54, 124, 127, 136, 139, 145, 151, 154, 325, 358, 379, 394, 125, 128, 137, 140, 146, 152, 155, 326, 353, 359, 377, 380, 392, or 395 or a functional fragment thereof, wherein the amino acid molecule as defined in b., c., d. and e. is capable of catalysing the reaction from isoprenol and/or prenol to isopentenylphosphate and/or dimethylallyl phosphate in an aqueous medium.

4. (canceled)

5. A process for producing isopentenylphosphate and/or dimethylallyl phosphate or salt thereof comprising the steps of
i. Providing an aqueous medium comprising water, one or more kinase 1 and prenol and/or isoprenol,
ii. Incubating the aqueous medium and
iii. Optionally isolating the isopentenylphosphate and/or dimethylallyl phosphate or salt thereof from the reaction mixture,
wherein the one or more kinase 1 is capable of catalyzing the reaction from prenol and/or isoprenol to isopentenylphosphate and/or dimethylallyl phosphate in an aqueous medium comprising water, kinase 1 and prenol and/or isoprenol, wherein after incubation at least 10% of the isoprenol and/or prenol have been converted to isopentenylphosphate or a salt thereof and/or dimethylallyl phosphate or a salt thereof

6. The process according to claim 5 wherein after incubation at least 20% of the isoprenol and/or prenol have been converted to isopentenylphosphate or a salt thereof and/or dimethylallyl phosphate or a salt thereof

7. The process according to claim 5 wherein the kinase 1 a sequence selected from the group consisting of
a. The amino acid molecule of SEQ ID NO: 43, 46, 49, 52, 123, 126, 135, 138, 144, 150, 153, 324, 351, 357, 375, 378, 390, or 393,
b. An amino acid molecule having at least 50% identity to the amino acid molecule of SEQ ID NO: 43, 46, 49, 52, 123, 126, 135, 138, 144, 150, 153, 324, 351, 357, 375, 378, 390, or 393 or a functional fragment thereof,
c. An amino acid molecule encoded by a nucleic acid molecule of SEQ ID NO: 44, 45, 47, 48, 50, 51, 53, 54, 124, 127, 136, 139, 145, 151, 154, 325, 358, 379, 394, 125, 128, 137, 140, 146, 152, 155, 326, 353, 359, 377, 380, 392, or 395 or a functional fragment thereof,
d. An amino acid molecule encoded by a nucleic acid molecule having at least 50% identity to SEQ ID NO: 44, 45, 47, 48, 50, 51, 53, 54, 124, 127, 136, 139, 145, 151, 154, 325, 358, 379, 394, 125, 128, 137, 140, 146, 152, 155, 326, 353, 359, 377, 380, 392, or 395 or a functional fragment thereof, and
e. An amino acid molecule encoded by a nucleic acid molecule hybridizing under stringent conditions to a fragment of at least 250 bases complementary to SEQ ID NO: 44, 45, 47, 48, 50, 51, 53, 54, 124, 127, 136, 139, 145, 151, 154, 325, 358, 379, 394, 125, 128, 137, 140, 146, 152, 155, 326, 353, 359, 377, 380, 392, or 395 or a functional fragment thereof,
wherein the amino acid molecule as defined in b., c., d. and e. is capable of catalysing the reaction from isoprenol and/or prenol to isopentenylphosphate and/or dimethylallyl phosphate in an aqueous medium.

8. (canceled)

9. A recombinant construct comprising a kinase 1 wherein the kinase 1 comprises a sequence encoding an amino acid molecule selected from the group consisting of
a. The amino acid molecule of SEQ ID NO: 43, 46, 49, 52, 123, 126, 135, 138, 144, 150, 153, 324, 351, 357, 375, 378, 390, or 393,
b. An amino acid molecule having at least 50% identity to the amino acid molecule of SEQ ID NO: 43, 46, 49, 52, 123, 126, 135, 138, 144, 150, 153, 324, 351, 357, 375, 378, 390, or 393, or a functional fragment thereof,
c. An amino acid molecule encoded by a nucleic acid molecule of SEQ ID NO: 44, 45, 47, 48, 50, 51, 53, 54, 124, 127, 136, 139, 145, 151, 154, 325, 358, 379, 394, 125, 128, 137, 140, 146, 152, 155, 326, 353, 359, 377, 380, 392, or 395 or a functional fragment thereof,
d. An amino acid molecule encoded by a nucleic acid molecule having at least 50% identity to SEQ ID NO: 44, 45, 47, 48, 50, 51, 53, 54, 124, 127, 136, 139, 145, 151, 154, 325, 358, 379, 394, 125, 128, 137, 140, 146, 152, 155, 326, 353, 359, 377, 380, 392, or 395 or a functional fragment thereof, and
e. An amino acid molecule encoded by a nucleic acid molecule hybridizing under stringent conditions to a fragment of at least 250 bases complementary to SEQ ID NO: 44, 45, 47, 48, 50, 51, 53, 54, 124, 127, 136, 139, 145, 151, 154, 325, 358, 379, 394, 125, 128, 137, 140, 146, 152, 155, 326, 353, 359, 377, 380, 392, or 395 or a functional fragment thereof,
wherein the amino acid molecule as defined in b., c., d. and e. is capable of catalysing the reaction from isoprenol and/or prenol to isopentenylphosphate and/or dimethylallyl phosphate in an aqueous medium.

10. The recombinant construct of claim 9, wherein the kinase 1 is functionally linked to a heterologous promoter.

11. A recombinant vector comprising the recombinant construct of claim 9.

12. A recombinant microorganism comprising the recombinant construct of claim 9.

13. The recombinant microorganism of claim 12 wherein the microorganism is Rhodococcus rhodochrous, Aerococcus sp., Aspergillus sp., Bacillus pumilus, Bacillus subtilis, Bacteroides thetaiotaomicron, Clostridium algidicarnis, Corynebacterium efficiens, Corynebacterium glutamicum, Escherichia coli, Haloferax volcanii, Lactobacillus casei, Methanocaldococcus jannaschii, Methanothermobacter thermautotrophicus, Myceliophthora thermophila, Pichia pastoris, Pseudomonas synxantha, Pseudomonas azotoformans, Pseudomonas jluorescens, Pseudomonas ovalis, Pseudomonas stutzeri, Pseudomonas acidovolans, Pseudomonas mucidolens, Pseudomonas testosteroni, Pseudomonas aeruginosa, Pseudozyma tsukubaensis, Ralstonia eutropha, Rhodobacter sphaeroides, Rhodococcus opacus, Saccharomyces cerevisiae, Shigella boydii, Sinorhizobium meliloti, Streptomyces antibioticus, Streptomyces avermitilis, Streptomyces cacaoi, Streptomyces coelicolor, Streptomyces flavelus, Streptomyces griseolus, Streptomyces lavendulae, Streptomyces lividans, Streptomyces olivaceus, Streptomyces tanashiensis, Streptomyces virginiae, Streptomyces viridochromogenes, Thermoplasma acidophilum, Vibrio natrigens or Yarrowia lipolytica.

14. A composition comprising water, a kinase 1, isopentenylphosphate and/or dimethylallyl phosphate wherein the kinase 1 comprises a sequence selected from the group consisting of
a. The amino acid molecule of SEQ ID NO: 43, 46, 49, 52, 123, 126, 135, 138, 144, 150, 153, 324, 351, 357, 375, 378, 390, or 393,
b. An amino acid molecule having at least 50% identity to the amino acid molecule of SEQ ID NO: 43, 46, 49, 52, 123, 126, 135, 138, 144, 150, 153, 324, 351, 357, 375, 378, 390, or 393, or a functional fragment thereof,
c. An amino acid molecule encoded by a nucleic acid molecule of SEQ ID NO: 44, 45, 47, 48, 50, 51, 53, 54, 124, 127, 136, 139, 145, 151, 154, 325, 358, 379, 394, 125, 128, 137, 140, 146, 152, 155, 326, 353, 359, 377, 380, 392, or 395 or a functional fragment thereof,
d. An amino acid molecule encoded by a nucleic acid molecule having at least 50% identity to SEQ ID NO: 44, 45, 47, 48, 50, 51, 53, 54, 124, 127, 136, 139, 145, 151, 154, 325, 358, 379, 394, 125, 128, 137, 140, 146, 152, 155, 326, 353, 359, 377, 380, 392, or 395 or a functional fragment thereof, and
e. An amino acid molecule encoded by a nucleic acid molecule hybridizing under stringent conditions to a fragment of at least 250 bases complementary to SEQ ID NO: 44, 45, 47, 48, 50, 51, 53, 54, 124, 127, 136, 139, 145, 151, 154, 325, 358, 379, 394, 125, 128, 137, 140, 146, 152, 155, 326, 353, 359, 377, 380, 392, or 395 or a functional fragment thereof, wherein the amino acid molecule as defined in b., c., d. and e. is capable of catalysing the reaction from isoprenol and/or prenol to isopentenylphosphate and/or dimethylallyl phosphate in an aqueous medium.

15. A process for producing isopentenylpyrophosphate and/or dimethylallyl pyrophosphate or salt thereof comprising the steps of
i. Providing an aqueous medium comprising water, one or more kinase 1, one or more kinase 2 and prenol and/or isoprenol,
ii. Incubating the aqueous medium and
iii. Optionally isolating the isopentenyl pyrophosphate and/or dimethylallyl pyrophosphate or salt thereof from the reaction mixture,
wherein the one or more kinase 1 is capable of catalysing the reaction from prenol and/or isoprenol to isopentenylphosphate and/or dimethylallyl phosphate in an aqueous medium comprising water, kinase 1 and prenol and/or isoprenol, and
wherein the one or more kinase 2 is capable of catalysing the reaction from isopentenylphosphate and/or dimethylallyl phosphate to isopentenyl pyrophosphate and/or dimethylallyl pyrophosphate in an aqueous medium comprising water, kinase 2 and isopentenylphosphate and/or dimethylallyl phosphate, wherein after incubation at least 10% of the isoprenol and/or prenol have been converted to isopentenyl pyrophosphate and/or dimethylallyl pyrophosphate.

16. The process according to claim 15 wherein after incubation at least 20% of the isoprenol and/or prenol have been converted to isopentenyl pyrophosphate and/or dimethylallyl pyrophosphate.

17. The process according to claim 15 wherein the kinase comprises a sequence selected from the group consisting of
a. The amino acid molecule of SEQ ID NO: 43, 46, 49, 52, 123, 126, 135, 138, 144, 150, 153, 324, 351, 357, 375, 378, 390, or 393,
b. An amino acid molecule having at least 50% identity to the amino acid molecule of SEQ ID NO: 43, 46, 49, 52, 123, 126, 135, 138, 144, 150, 153, 324, 351, 357, 375, 378, 390, or 393, or a functional fragment thereof,
c. An amino acid molecule encoded by a nucleic acid molecule of SEQ ID NO: 44, 45, 47, 48, 50, 51, 53, 54, 124, 127, 136, 139, 145, 151, 154, 325, 358, 379, 394, 125, 128, 137, 140, 146, 152, 155, 326, 353, 359, 377, 380, 392, or 395 or a functional fragment thereof,
d. An amino acid molecule encoded by a nucleic acid molecule having at least 50% identity to SEQ ID NO: 44, 45, 47, 48, 50, 51, 53, 54, 124, 127, 136, 139, 145, 151, 154, 325, 358, 379, 394, 125, 128, 137, 140, 146, 152, 155, 326, 353, 359, 377, 380, 392, or 395 or a functional fragment thereof, and
e. An amino acid molecule encoded by a nucleic acid molecule hybridizing under stringent conditions to a fragment of at least 250 bases complementary to SEQ ID NO: 44, 45, 47, 48, 50, 51, 53, 54, 124, 127, 136, 139, 145, 151, 154, 325, 358, 379, 394, 125, 128, 137, 140, 146, 152, 155, 326, 353, 359, 377, 380, 392, or 395 or a functional fragment thereof,
wherein the amino acid molecule as defined in b., c., d. and e. is capable of catalysing the reaction from isoprenol and/or prenol to isopentenylphosphate and/or dimethylallyl phosphate in an aqueous medium.

18. The process according to claim 17 wherein the kinase 2 comprises a sequence selected from the group consisting of
f. The amino acid molecule of SEQ ID NO: 76, 85, 88,103, 138, 171, 174, 177, 180, 183, 189, 192, 195, 198, 201, 204, 207, 210, 216, 219, 222, 225, 228, 231, 234, 237, 240, 246, 249, 252, 255, 258, 261, 270, 273, 279, 282, 288, 426, 429, 435, 447, or 483,
g. An amino acid molecule having at least 50% identity to the amino acid molecule of SEQ ID NO: 76, 85, 88, 103, 138, 171, 174, 177, 180, 183, 189, 192, 195, 198, 201, 204, 207, 210, 216, 219, 222, 225, 228, 231, 234, 237, 240, 246, 249, 252, 255, 258, 261, 270, 273, 279, 282, 288, 426, 429, 435, 447, or 483 or a functional fragment thereof,
h. An amino acid molecule encoded by a nucleic acid molecule of SEQ ID NO: 77, 78, 86, 87, 89, 90, 104, 105, 139, 172, 175, 178, 181, 184, 190, 193, 196, 199, 202, 205, 208, 211, 217, 220, 223, 226, 229, 232, 235, 238, 241, 247, 250, 253, 256, 259, 262, 271, 274, 280, 283, 289, 430, 448, 484, 140, 173, 176, 179, 182, 185, 191, 194, 197, 200, 203, 206, 209, 212, 218, 221, 224, 227, 230, 233, 236, 239, 242, 248, 251, 254, 257, 260, 263, 272, 275, 281, 284, 290, 428, 431, 437, 449, or 485 or a functional fragment thereof,
i. An amino acid molecule encoded by a nucleic acid molecule having at least 50% identity to SEQ ID NO: 77, 78, 86, 87, 89, 90, 104, 105, 139, 172, 175, 178, 181, 184, 190, 193, 196, 199, 202, 205, 208, 211, 217, 220, 223, 226, 229, 232, 235, 238, 241, 247, 250, 253, 256, 259, 262, 271, 274, 280, 283, 289, 430, 448, 484, 140, 173, 176, 179, 182, 185, 191, 194, 197, 200, 203, 206, 209, 212, 218, 221, 224, 227, 230, 233, 236, 239, 242, 248, 251, 254, 257, 260, 263, 272, 275, 281, 284, 290, 428, 431, 437, 449, or 485 or a functional fragment thereof, and
j. An amino acid molecule encoded by a nucleic acid molecule hybridizing under stringent conditions to a fragment of at least 250 bases complementary to SEQ ID NO: 77, 78, 86, 87, 89, 90, 104, 105, 139, 172, 175, 178, 181, 184, 190, 193, 196, 199, 202, 205, 208, 211, 217, 220, 223, 226, 229, 232, 235, 238, 241, 247, 250, 253, 256, 259, 262, 271, 274, 280, 283, 289, 430, 448, 484, 140, 173, 176, 179, 182, 185, 191, 194, 197, 200, 203, 206, 209, 212, 218, 221, 224, 227, 230, 233, 236, 239, 242, 248, 251, 254, 257, 260, 263, 272, 275, 281, 284, 290, 428, 431, 437, 449, or 485 or a functional fragment thereof,
wherein the amino acid molecule as defined in g., h., i. and j. is capable of catalysing the reaction from isopentenylphosphate and/or dimethylallyl phosphate to isopentenyl pyrophosphate and/or dimethylallyl pyrophosphate in an aqueous medium.

19. (canceled)

20. (canceled)

21. (canceled)

22. (canceled)

23. (canceled)

24. (canceled)

25. (canceled)

26. (canceled)

27. (canceled)

28. A recombinant microorganism comprising an introduced, increased or enhanced activity and/or expression of one or more kinase 1, one or more kinase 2 and optionally one or more pathways capable of producing one or more isoprenoids, wherein the one or more kinase 1 is capable of catalysing the reaction from prenol and/or isoprenol to isopentenylphosphate and/or dimethylallyl phosphate, and wherein the one or more kinase 2 is capable of catalysing the reaction from isopentenylphosphate and/or dimethylallyl phosphate to isopentenyl pyrophosphate and/or dimethylallyl pyrophosphate, and wherein the kinase 1 comprises a sequence selected from the group consisting of
a. The amino acid molecule of SEQ ID NO: 43, 46, 49, 52, 123, 126, 135, 138, 144, 150, 153, 324, 351, 357, 375, 378, 390, or 393
b. An amino acid molecule having at least 50% identity to the amino acid molecule of SEQ ID NO: 43, 46, 49, 52, 123, 126, 135, 138, 144, 150, 153, 324, 351, 357, 375, 378, 390, or 393 or a functional fragment thereof,
c. An amino acid molecule encoded by a nucleic acid molecule of SEQ ID NO: 44, 45, 47, 48, 50, 51, 53, 54, 124, 127, 136, 139, 145, 151, 154, 325, 358, 379, 394, 125, 128, 137, 140, 146, 152, 155, 326, 353, 359, 377, 380, 392, or 395 or a functional fragment thereof,
d. An amino acid molecule encoded by a nucleic acid molecule having at least 50% identity to SEQ ID NO: 44, 45, 47, 48, 50, 51, 53, 54, 124, 127, 136, 139, 145, 151, 154, 325, 358, 379, 394, 125, 128, 137, 140, 146, 152, 155, 326, 353, 359, 377, 380, 392, or 395 or a functional fragment thereof, and
e. An amino acid molecule encoded by a nucleic acid molecule hybridizing under stringent conditions to a fragment of at least 250 bases complementary to SEQ ID NO: 44, 45, 47, 48, 50, 51, 53, 54, 124, 127, 136, 139, 145, 151, 154, 325, 358, 379, 394, 125, 128, 137, 140, 146, 152, 155, 326, 353, 359, 377, 380, 392, or 395 or a functional fragment thereof, and
wherein the amino acid molecule as defined in b., c., d. and e. is capable of catalysing the reaction from isoprenol and/or prenol to isopentenylphosphate and/or dimethylallyl.

29. The composition of claim 28 wherein the kinase 2 comprises a sequence selected from the group consisting of
f. The amino acid molecule of SEQ ID NO: 76, 85, 88, 103, 138, 171, 174, 177, 180, 183, 189, 192, 195, 198, 201, 204, 207, 210, 216, 219, 222, 225, 228, 231, 234, 237, 240, 246, 249, 252, 255, 258, 261, 270, 273, 279, 282, 288, 426, 429, 435, 447, or 483,
g. An amino acid molecule having at least 50% identity to the amino acid molecule of SEQ ID NO: 76, 85, 88, 103, 138, 171, 174, 177, 180, 183, 189, 192, 195, 198, 201, 204, 207, 210, 216, 219, 222, 225, 228, 231, 234, 237, 240, 246, 249, 252, 255, 258, 261, 270, 273, 279, 282, 288, 426, 429, 435, 447, or 483 or a functional fragment thereof,
h. An amino acid molecule encoded by a nucleic acid molecule of SEQ ID NO: 77, 78, 86, 87, 89, 90, 104, 105, 139, 172, 175, 178, 181, 184, 190, 193, 196, 199, 202, 205, 208, 211, 217, 220, 223, 226, 229, 232, 235, 238, 241, 247, 250, 253, 256, 259, 262, 271, 274, 280, 283, 289, 430, 448, 484, 140, 173, 176, 179, 182, 185, 191, 194, 197, 200, 203, 206, 209, 212, 218, 221, 224, 227, 230, 233, 236, 239, 242, 248, 251, 254, 257, 260, 263, 272, 275, 281, 284, 290, 428, 431, 437, 449, or 485 or a functional fragment thereof,
i. An amino acid molecule encoded by a nucleic acid molecule having at least 50% identity to SEQ ID NO: 77, 78, 86, 87, 89, 90, 104, 105, 139, 172, 175, 178, 181, 184, 190, 193, 196, 199, 202, 205, 208, 211, 217, 220, 223, 226, 229, 232, 235, 238, 241, 247, 250, 253, 256, 259, 262, 271, 274, 280, 283, 289, 430, 448, 484, 140, 173, 176, 179, 182, 185, 191, 194, 197, 200, 203, 206, 209, 212, 218, 221, 224, 227, 230, 233, 236, 239, 242, 248, 251, 254, 257, 260, 263, 272, 275, 281, 284, 290, 428, 431, 437, 449, or 485 or a functional fragment thereof, and
j. An amino acid molecule encoded by a nucleic acid molecule hybridizing under stringent conditions to a fragment of at least 250 bases complementary to SEQ ID NO: 77, 78, 86, 87, 89, 90, 104, 105, 139, 172, 175, 178, 181, 184, 190, 193, 196, 199, 202, 205, 208, 211, 217, 220, 223, 226, 229, 232, 235, 238, 241, 247, 250, 253, 256, 259, 262, 271, 274, 280, 283, 289, 430, 448, 484, 140, 173, 176, 179, 182, 185, 191, 194, 197, 200, 203, 206, 209, 212, 218, 221, 224, 227, 230, 233, 236, 239, 242, 248, 251, 254, 257, 260, 263, 272, 275, 281, 284, 290, 428, 431, 437, 449, or 485 or a functional fragment thereof, and wherein the amino acid molecule as defined in g., h., i. and j. is capable of catalysing the reaction from isopentenylphosphate and/or dimethylallyl phosphate to isopentenyl pyrophosphate and/or dimethylallyl pyrophosphate.

30. A method for fermentative production of one or more isoprenoid or salt thereof or isopentenyl pyrophosphate and/or dimethylallyl pyrophosphate or salt thereof comprising the steps of
i. Providing a recombinant microorganism of claim 28, and
ii. Culturing said microorganism in a medium comprising prenol and/or isoprenol under conditions that allow for the production of said one or more isoprenoid or salt thereof or isopentenyl pyrophosphate and/or dimethylallyl pyrophosphate or salt thereof and optionally isolating said one or more isoprenoid or salt thereof or isopentenyl pyrophosphate and/or dimethylallyl pyrophosphate or salt thereof from the medium.

31. (canceled)

32. (canceled)

33. A method for producing a recombinant microorganism of claim 28 comprising the steps of:
(I) introducing, increasing or enhancing the activity and/or expression of a kinase 1 gene encoding a kinase 1 enzyme having a prenol and/or isoprenol phosphorylating activity in said microorganism;
(II) introducing, increasing or enhancing the activity and/or expression of a kinase 2 gene encoding a kinase 2 enzyme having an isopentenylphosphate and/or dimethylallyl phosphate phosphorylating activity in said microorganism; and optionally
(III) further introducing, increasing or enhancing the activity and/or expression of an isoprenoid producing pathway in said microorganism.

34. The microorganism of claim 28, wherein the microorganism is Rhodococcus rhodochrous, Aerococcus sp., Aspergillus sp., Bacillus pumilus, Bacillus subtilis, Bacteroides thetaiotaomicron, Clostridium algidicarnis, Corynebacterium efficiens, Corynebacterium glutamicum, Escherichia coli, Haloferax volcanii, Lactobacillus casei, Methanocaldococcus jannaschii, Methanothermobacter thermautotrophicus, Myceliophthora thermophila, Pichia pastoris, Pseudomonas synxantha, Pseudomonas azotoformans, Pseudomonas jluorescens, Pseudomonas ovalis, Pseudomonas stutzeri, Pseudomonas acidovolans, Pseudomonas mucidolens, Pseudomonas testosteroni, Pseudomonas aeruginosa, Pseudozyma tsukubaensis, Ralstonia eutropha, Rhodobacter sphaeroides, Rhodococcus opacus, Saccharomyces cerevisiae, Shigella boydii, Sinorhizobium meliloti, Streptomyces antibioticus, Streptomyces avermitilis, Streptomyces cacaoi, Streptomyces coelicolor, Streptomyces flavelus, Streptomyces griseolus, Streptomyces lavendulae, Streptomyces lividans, Streptomyces olivaceus, Streptomyces tanashiensis, Streptomyces virginiae, Streptomyces viridochromogenes, Thermoplasma acidophilum, Vibrio natrigens or Yarrowia lipolytica.

35. A recombinant expression construct comprising
i. a promoter functional in a microorganism functionally linked to a nucleic acid molecule encoding a kinase 1 and
ii. a promoter functional in a microorganism functionally linked to a nucleic acid molecule encoding kinase 2,
wherein at least one of the promoters functionally linked to the kinase 1 or kinase 2 is heterologous to the kinase 1 or kinase 2,
wherein the kinase 1 comprises a sequence encoding an amino acid molecule selected from the group consisting of
a. The amino acid molecule of SEQ ID NO: 43, 46, 49, 52, 123, 126, 135, 138, 144, 150, 153, 324, 351, 357, 375, 378, 390, or 393,
b. An amino acid molecule having at least 50% identity to the amino acid molecule of SEQ ID NO: 43, 46, 49, 52, 123, 126, 135, 138, 144, 150, 153, 324, 351, 357, 375, 378, 390, or 393 or a functional fragment thereof,
c. An amino acid molecule encoded by a nucleic acid molecule of SEQ ID NO: 44, 45, 47, 48, 50, 51, 53, 54, 124, 127, 136, 139, 145, 151, 154, 325, 358, 379, 394, 125, 128, 137, 140, 146, 152, 155, 326, 353, 359, 377, 380, 392, or 395 or a functional fragment thereof,
d. An amino acid molecule encoded by a nucleic acid molecule having at least 50% identity to SEQ ID NO: 44, 45, 47, 48, 50, 51, 53, 54, 124, 127, 136, 139, 145, 151, 154, 325, 358, 379, 394, 125, 128, 137, 140, 146, 152, 155, 326, 353, 359, 377, 380, 392, or 395 or a functional fragment thereof, and
e. An amino acid molecule encoded by a nucleic acid molecule hybridizing under stringent conditions to a fragment of at least 250 bases complementary to SEQ ID NO: 44, 45, 47, 48, 50, 51, 53, 54, 124, 127, 136, 139, 145, 151, 154, 325, 358, 379, 394, 125, 128, 137, 140, 146, 152, 155, 326, 353, 359, 377, 380, 392, or 395 or a functional fragment thereof, and
wherein the amino acid molecule as defined in b., c., d. and e. is capable of catalysing the reaction from isoprenol and/or prenol to isopentenylphosphate and/or dimethylallyl.

36. The recombinant expression construct of claim 35 wherein the kinase 2 comprises comprising a sequence selected from the group consisting of
f. The amino acid molecule of SEQ ID NO: 76, 85, 88, 103, 138, 171, 174, 177, 180, 183, 189, 192, 195, 198, 201, 204, 207, 210, 216, 219, 222, 225, 228, 231, 234, 237, 240, 246, 249, 252, 255, 258, 261, 270, 273, 279, 282, 288, 426, 429, 435, 447, or 483,
g. An amino acid molecule having at least 50% identity to the amino acid molecule of SEQ ID NO: 76, 85, 88, 103, 138, 171, 174, 177, 180, 183, 189, 192, 195, 198, 201, 204, 207, 210, 216, 219, 222, 225, 228, 231, 234, 237, 240, 246, 249, 252, 255, 258, 261, 270, 273, 279, 282, 288, 426, 429, 435, 447, or 483 or a functional fragment thereof,
h. An amino acid molecule encoded by a nucleic acid molecule of SEQ ID NO: 77, 78, 86, 87, 89, 90, 104, 105, 139, 172, 175, 178, 181, 184, 190, 193, 196, 199, 202, 205, 208, 211, 217, 220, 223, 226, 229, 232, 235, 238, 241, 247, 250, 253, 256, 259, 262, 271, 274, 280, 283, 289, 430, 448, 484, 140, 173, 176, 179, 182, 185, 191, 194, 197, 200, 203, 206, 209, 212, 218, 221, 224, 227, 230, 233, 236, 239, 242, 248, 251, 254, 257, 260, 263, 272, 275, 281, 284, 290, 428, 431, 437, 449, or 485 or a functional fragment thereof,
i. An amino acid molecule encoded by a nucleic acid molecule having at least 50% identity to SEQ ID NO: 77, 78, 86, 87, 89, 90, 104, 105, 139, 172, 175, 178, 181, 184, 190, 193, 196, 199, 202, 205, 208, 211, 217, 220, 223, 226, 229, 232, 235, 238, 241, 247, 250, 253, 256, 259, 262, 271, 274, 280, 283, 289, 430, 448, 484, 140, 173, 176, 179, 182, 185, 191, 194, 197, 200, 203, 206, 209, 212, 218, 221, 224, 227, 230, 233, 236, 239, 242, 248, 251, 254, 257, 260, 263, 272, 275, 281, 284, 290, 428, 431, 437, 449, or 485 or a functional fragment thereof, and
j. An amino acid molecule encoded by a nucleic acid molecule hybridizing under stringent conditions to a fragment of at least 250 bases complementary to SEQ ID NO: 77, 78, 86, 87, 89, 90, 104, 105, 139, 172, 175, 178, 181, 184, 190, 193, 196, 199, 202, 205, 208, 211, 217, 220, 223, 226, 229, 232, 235, 238, 241, 247, 250, 253, 256, 259, 262, 271, 274, 280, 283, 289, 430, 448, 484, 140, 173, 176, 179, 182, 185, 191, 194, 197, 200, 203, 206, 209, 212, 218, 221, 224, 227, 230, 233, 236, 239, 242, 248, 251, 254, 257, 260, 263, 272, 275, 281, 284, 290, 428, 431, 437, 449, or 485 or a functional fragment thereof, and wherein the amino acid molecule as defined in g., h., i. and j. is capable of catalysing the reaction from isopentenylphosphate and/or dimethylallyl phosphate to isopentenyl pyrophosphate and/or dimethylallyl pyrophosphate.

37. A recombinant vector comprising the recombinant expression construct of claim 35.

38. A recombinant microorganism comprising the recombinant expression construct of claim 35.

39. A method of culturing or growing the recombinant microorganism of claim 28 comprising inoculating a culture medium with one or more of said recombinant microorganisms and culturing or growing said recombinant microorganism in culture medium comprising prenol and/or isoprenol.

40. (canceled)

41. A process for whole cell bio-conversion of prenol and/or isoprenol to one or more isoprenoid or salt thereof or isopentenyl pyrophosphate and/or dimethylallyl pyrophosphate comprising the steps of
I) growing the recombinant microorganism according to claim 28 in a fermenter comprising isoprenol and/or prenol, a medium suitable for growing said recombinant microorganism and a C-source and
II) recovering the one or more isoprenoid or salt thereof or isopentenyl pyrophosphate and/or dimethylallyl pyrophosphate thereof from the fermentation broth obtained in I).

42. A process for whole cell bio-conversion of prenol and/or isoprenol to one or more isoprenoid or salt thereof or isopentenyl pyrophosphate and/or dimethylallyl pyrophosphate comprising the steps of
i) growing the recombinant microorganism according to claim 28 in a fermenter comprising a medium suitable for growing said recombinant microorganism and a C-source,
ii) recovering the recombinant microorganism from the fermenter,
iii) performing a whole cell bio-conversion in an aqueous medium by supplementing isoprenol/prenol, and
iv) recovering the one or more isoprenoid or salt thereof or IPP and/or DMAPP from the aqueous medium obtained in iii).
